(19) United States
(12) Patent Application Publication
(10) Pub. No.: US 2019/0000880 A1
(43) Pub. Date: Jan. 3, 2019

(54) IMMUNE EFFECTOR CELL THERAPIES WITH ENHANCED EFFICACY

(71) Applicants: Gregory Motz, Quincy, MA (US); Konstantinos John Mavrakias, Cambridge, MA (US); Jinbiao Liu, Shanghai (CN); Lei Liu, Shanghai (CN); Qiangang Zheng, Shanghai (CN); Guoliang Xun, Shanghai (CN); Qitao Xiao, Shanghai (CN); Novartis AG, Basel (CH); The Trustees of the University of Pennsylvania, Philadelphia, PA (US)

(72) Inventors: Gregory Motz, Quincy, MA (US); Konstantinos John Mavrakias, Cambridge, MA (US); Jinbiao Liu, Shanghai (CN); Lei Liu, Shanghai (CN); Qiangang Zheng, Shanghai (CN); Guoliang Xun, Shanghai (CN); Qitao Xiao, Shanghai (CN)

(21) Appl. No.: 16/066,855

(22) PCT Filed: Dec. 30, 2016
(86) PCT No.: PCT/CN2016/113612

§ 371 Date: Jun. 28, 2018

(30) Foreign Application Priority Data
Dec. 30, 2015 (CN) PCT/CN2015/099882

(51) Int. Cl. A61K 35/17; C07D 207/34; C12N 5/0783; C07D 401/14; C12N 15/113; A61P 35/00; C07K 16/28; C07K 16/24; C07K 16/30

(52) U.S. Cl. CPC A61K 35/17; C07D 207/34; C12N 5/0636; C07D 401/14; C12N 15/1137; A61K 2300/00; C07K 16/2815; C07K 16/2818; C07K 16/241; C07K 16/2863; C07K 16/3092; A61P 35/00

(57) ABSTRACT

Provided are the use of LSD1 inhibitors in connection with use and manufacture of immune effector cells (e.g., T cells, NK cells), e.g., engineered to express a chimeric antigen receptor (CAR), to treat a subject having a disease, e.g., a disease associated with expression of a tumor antigen.

### RELATED APPLICATIONS

[0001] This application claims priority to PCT Patent Application Number PCT/CN2015/099882, filed Dec. 30, 2015, the entire contents of which are incorporated herein by reference.

### SEQUENCE LISTING

[0002] The instant application contains a Sequence Listing which has been submitted electronically in ASCII format and is hereby incorporated by reference in its entirety. Said ASCII copy, created on Dec. 29, 2016, is named N2067-7105WO3_SL.txt and is 1,118,768 bytes in size.

### FIELD OF THE INVENTION

[0003] The present invention relates generally to the use LSD1 inhibitors in connection with use and manufacture of immune effector cells (e.g., T cells, NK cells), e.g., engineered to express a chimeric antigen receptor (CAR), to treat a subject having a disease, e.g., a disease associated with expression of a tumor antigen.

### BACKGROUND OF THE INVENTION

[0004] Adoptive cell transfer (ACT) therapy, for example, with T-cells transduced with Chimeric Antigen Receptors (CARs), has shown promise in cancer trials. There is a medical need for T cell therapies, especially CAR T cell therapies with improved efficacy.

### SUMMARY OF THE INVENTION

[0005] Methods and compositions disclosed herein are directed to the use of an inhibitor of Lysine-specific demethylase 1 (LSD1) in connection with the use and/or manufacture of immune effector cells (e.g., T cells or NK cells), for example, immune effector cells engineered to express a Chimeric Antigen Receptor (CAR), to treat a disease, e.g., a disease associated with expression of a cancer associated antigen (or tumor marker).

[0006] It has been discovered that inhibition of LSD1 is effective in improving the function of immune effector cells, e.g., engineered to express a CAR molecule, e.g., as described herein, and can be combined with T cell, e.g., CAR T cell, therapy and/or manufacturing.

[0007] While not wishing to be bound by theory, it is believed that contacting a population of immune effector cells, e.g., engineered to express a CAR molecule, e.g., as described herein, with an LSD1 inhibitor is accompanied by an increase in the proportion of naive T cells (e.g., CD45RA+CD62L+ T cells, e.g., T_{SCM} cells), at least transiently, relative to an uncontacted population, for example, when such cells are stimulated (e.g., with anti-CD3 and/or anti-CD28 stimulation) or induced to proliferate (e.g., in response to antigen recognition, e.g., antigen recognition through a CAR molecule, e.g., as described herein).

[0008] While not wishing to be bound by theory, it is believed that contacting a population of immune effector cells, e.g., engineered to express a CAR molecule, e.g., as described herein, with an LSD1 inhibitor is accompanied by an increase in the number of naive T cells (e.g., CD45RA+CD62L+ T cells, e.g., T_{SCM} cells), at least transiently, relative to an uncontacted population, for example, when such cells are stimulated (e.g., with anti-CD3 and/or anti-CD28 stimulation) or induced to proliferate (e.g., in response to antigen recognition, e.g., antigen recognition through a CAR).

[0009] While not wishing to be bound by theory, it is believed that contacting a population of immune effector cells, e.g., engineered to express a CAR molecule, e.g., as described herein, with an LSD1 inhibitor is accompanied by a decrease in the number of T_{EM} cells, at least transiently, relative to an uncontacted population, for example, when such cells are stimulated (e.g., with anti-CD3 and/or anti-CD28 stimulation) or induced to proliferate (e.g., in response to antigen recognition, e.g., antigen recognition through a CAR).

[0010] While not wishing to be bound by theory, it is believed that contacting a population of immune effector cells, e.g., engineered to express a CAR molecule, e.g., as described herein, with an LSD1 inhibitor is accompanied by a decrease in the proportion of T_{EM} cells, at least transiently, relative to an uncontacted population, for example, when such cells are stimulated (e.g., with anti-CD3 and/or anti-CD28 stimulation) or induced to proliferate (e.g., in response to antigen recognition, e.g., antigen recognition through a CAR molecule, e.g., as described herein).

[0011] While not wishing to be bound by theory, it is believed that contacting a population of immune effector cells, e.g., engineered to express a CAR molecule, e.g., as described herein, with an LSD1 inhibitor is accompanied by an increase in the production of cytokines (e.g., IFNg and/or IL-2) from said population of immune effector cells, at least transiently, relative to an uncontacted population, for example, when such cells are stimulated (e.g., with anti-CD3 and/or anti-CD28 stimulation) or induced to proliferate (e.g., in response to antigen recognition, e.g., antigen recognition through a CAR molecule, e.g., as described herein).

[0012] While not wishing to be bound by theory, it is believed that contacting a population of immune effector cells, e.g., engineered to express a CAR molecule, e.g., as described herein, with an LSD1 inhibitor is accompanied by a decrease in the proportion of PD-1 positive immune effector cells, at least transiently, relative to an uncontacted population, for example, when such cells are stimulated (e.g., with anti-CD3 and/or anti-CD28 stimulation) or induced to proliferate (e.g., in response to antigen recognition, e.g., antigen recognition through a CAR molecule, e.g., as described herein).

[0013] While not wishing to be bound by theory, it is believed that contacting a population of immune effector cells, e.g., engineered to express a CAR molecule, e.g., as described herein, with an LSD1 inhibitor is accompanied by an increase in the ratio of PD-1 negative immune effector cells/PD-1 positive immune effector cells, at least transiently, relative to an uncontacted population, for example, when such cells are stimulated (e.g., with anti-CD3 and/or anti-CD28 stimulation) or induced to proliferate (e.g., in response to antigen recognition, e.g., antigen recognition through a CAR molecule, e.g., as described herein).

[0014] While not wishing to be bound by theory, it is believed that contacting a population of immune effector cells, e.g., engineered to express a CAR molecule, e.g., as described herein, with an LSD1 inhibitor is accompanied by a decrease in the proportion of PD-1+/Lag3+/Tim3+ immune effector cells, at least transiently, relative to an uncontacted population, for example, when such cells are stimulated (e.g., with anti-CD3 and/or anti-CD28 stimulation) or induced to proliferate (e.g., in response to antigen recognition, e.g., antigen recognition through a CAR molecule, e.g., as described herein).

[0015] While not wishing to be bound by theory, it is believed that contacting a population of immune effector cells, e.g., engineered to express a CAR molecule, e.g., as described herein, with an LSD1 inhibitor is accompanied by an increase in the ratio of PD-1−/Lag3−/Tim3− immune effector cells to PD-1+/Lag3+/Tim3+ immune effector cells, at least transiently, relative to an uncontacted population, for example, when such cells are stimulated (e.g., with anti-CD3 and/or anti-CD28 stimulation) or induced to proliferate (e.g., in response to antigen recognition, e.g., antigen recognition through a CAR molecule, e.g., as described herein).

[0016] While not wishing to be bound by theory, it is believed that contacting a population of immune effector cells, e.g., engineered to express a CAR molecule, e.g., as described herein, with an LSD1 inhibitor is accompanied by an increase in the proliferation of the immune effector cells, at least transiently, relative to an uncontacted population, for example, when such cells are stimulated (e.g., with anti-CD3 and/or anti-CD28 stimulation) or induced to proliferate (e.g., in response to antigen recognition, e.g., antigen recognition through a CAR molecule, e.g., as described herein). Again, without being bound by theory, it is believed that T cells can be exhausted by, for example, stimulation with CD3/CD28 stimulation or antigen stimulation (e.g., by induced signaling through a CAR). Such exhaustion can lead to decreased efficacy or function (e.g., decreased proliferation, persistence, and/or anti-tumor efficacy) of such immune effector cells. As described herein, the inventors have discovered that inhibiting LSD1 increases the proliferation and/or survival of more naive T cells, e.g., T_{SCM} cells, which in turn have better efficacy and function. Thus, embodiments of the invention are based, at least in part, on the recognition that LSD1 inhibition, is associated with improved T cell function and/or phenotype.

[0017] In an embodiment these approaches can be used to optimize the performance of immune effector cells, e.g., T cells, in the subject. While not wishing to be bound by theory, it is believed that, in an embodiment, the performance of endogenous, non-modified immune effector cells, e.g., T cells, is improved. While not wishing to be bound by theory, it is believed that, in an embodiment, the performance of immune effector cells, e.g., T cells, harvested (e.g., from a subject administered an LSD1 inhibitor) and engineered to express a CAR molecule, e.g., as described herein, is improved. In other embodiments, a population of immune effector cells, e.g., T cells, which have been, or will be engineered to express a CAR molecule, e.g., as described herein, can be treated ex vivo by contact with an amount of an LSD1 inhibitor that improves the number or ratio of naive T cells, e.g., T_{SCM} cells, and/or improves the number or ratio of PD-1 negative, e.g., PD-1−/Tim3−/Lag3− T cells, relative to an uncontacted population.

[0018] In an embodiment, the LSD1 inhibitor is administered for an amount of time sufficient to decrease the proportion of PD-1 positive T cells, increase the proportion of PD-1 negative T cells, or increase the ratio of PD-1 negative T cells/PD-1 positive T cells, in the peripheral blood of the subject (or in a preparation of T cells isolated from the subject).

[0019] In an embodiment, the method of treating, e.g., promoting an immune response in, a subject, e.g., a human subject, comprises inhibiting a negative immune response mediated by the engagement of PD-1 with PD-L1 or PD-L2, e.g., relative to a T cell not contacted with an LSD1 inhibitor.

[0020] In an embodiment, the method of treating, e.g., promoting an immune response in, a subject, e.g., a human subject, comprises increasing the number of T cells capable of proliferation, e.g., relative to a T cell not contacted with an LSD1 inhibitor.

[0021] In an embodiment, the method of treating, e.g., promoting an immune response in, a subject, e.g., a human subject, comprises increasing the number of T cells capable of cytotoxic function, secreting cytokines, or activation, e.g., relative to a T cell not contacted with an LSD1 inhibitor.

[0022] In an embodiment, the method of treating, e.g., promoting an immune response in, a subject, e.g., a human subject, comprises increasing the amount of cytokine secretion (e.g., interferon gamma (IFN-g) and/or interleukin 2 (IL-2)) in response to stimulation and/or activation of the T cell, e.g., relative to a T cell not contacted with an LSD1 inhibitor.

[0023] In an embodiment, the LSD1 inhibitor is administered (in vivo or ex vivo) prior to administration of immune effector cells, e.g., T cells to be engineered to express a CAR molecule, e.g., as described herein, (e.g., prior to or after harvest of the immune effector cells) for an amount of time sufficient for one or more of the following to occur:

[0024] 1) an increase in the proportion of naive T cells, e.g., T_{SCM} cells;

[0025] 2) an increase in the number of naive T cells, e.g., T_{SCM} cells;

[0026] 3) a decrease in the number of T_{EM} cells;

[0027] 4) a decrease in the proportion of T_{EM} cells;

[0028] 5) an increase in the proportion of CD45RA+CD62L+ T cells;

[0029] 6) an increase in the number of CD45RA+CD62L+ T cells;

[0030] 7) an increase in the proportion of CD45RA+CCR7+ T cells;

[0031] 8) an increase in the number of CD45RA+CCR7+ T cells;

[0032] 9) a decrease in the proportion of PD-1 positive immune effector cells;

[0033] 10) an increase in the ratio of PD-1 negative immune effector cells/PD-1 positive immune effector cells;

[0034] 11) a decrease in the proportion of PD-1+/Lag3+/Tim3+ immune effector cells;

[0035] 12) an increase in the ratio of PD-1−/Lag3−/Tim3− immune effector cells to PD-1+/Lag3+/Tim3+ immune effector cells;

[0036] 13) an increase in the proliferation of the immune effector cells;

[0037] 14 an increase in the production of cytokines (e.g., IFNg and/or IL-2) from said population of immune effector cells; or

[0038] 15) a combination of two, three, four, five, six, seven, eight, nine, ten, eleven, twelve, thirteen, or more (e.g., all) of the above;

[0039] and wherein 1), 2), 3), 4), 5), 6), 7), 8), 9), 10), 11), 12) 13), 14) or 15) occurs e.g., at least transiently, e.g., permanently, e.g., as compared to a non-treated subject. In an embodiment, the immune effector cell, e.g., T cell, to be engineered to express a CAR molecule, e.g., as described herein, is harvested at least 5, 10, 15, 20, 25, 30, 35, 40, 45, 50, 55, or 60 days after initiation, or completion, of dosing with the LSD1 inhibitor.

[0040] In an embodiment, the LSD1 inhibitor is administered to a subject prior to harvest of immune effector cells, e.g., T cells to be engineered to express an CAR molecule, e.g., as described herein, for an amount of time sufficient for one or more of the following to occur e.g., to occur in the harvested cells or in the engineered cells (or in non-harvested cells, or in both):

[0041] 1) an increase in the proportion of naive T cells, e.g., T_{SCM} cells;

[0042] 2) an increase in the number of naive T cells, e.g., T_{SCM} cells;

[0043] 3) a decrease in the number of T_{EM} cells;

[0044] 4) a decrease in the proportion of T_{EM} cells;

[0045] 5) an increase in the proportion of CD45RA+CD62L+ T cells;

[0046] 6) an increase in the number of CD45RA+CD62L+ T cells;

[0047] 7) an increase in the proportion of CD45RA+CCR7+ T cells;

[0048] 8) an increase in the number of CD45RA+CCR7+ T cells;

[0049] 9) a decrease in the proportion of PD-1 positive immune effector cells;

[0050] 10) an increase in the ratio of PD-1 negative immune effector cells/PD-1 positive immune effector cells;

[0051] 11) a decrease in the proportion of PD-1+/Lag3+/Tim3+ immune effector cells;

[0052] 12) an increase in the ratio of PD-1−/Lag3−/Tim3− immune effector cells to PD-1+/Lag3+/Tim3+ immune effector cells;

[0053] 13) an increase in the proliferation of the immune effector cells;

[0054] 14 an increase in the production of cytokines (e.g., IFNg and/or IL-2) from said population of immune effector cells; or

[0055] 15) a combination of two, three, four, five, six, seven, eight, nine, ten, eleven, twelve, thirteen, or more (e.g., all) of the above;

[0056] and wherein 1), 2), 3), 4), 5), 6), 7), 8), 9), 10), 11), 12) 13), 14) or 15) occurs e.g., at least transiently, e.g., permanently, e.g., as compared to a non-treated subject. In an embodiment, the immune effector cell, e.g., T cell, to be engineered to express a CAR molecule, e.g., as described herein, is harvested at least 5, 10, 15, 20, 25, 30, 35, 40, 45, 50, 55, or 60 days after initiation, or completion, of dosing with the LSD1 inhibitor.

[0057] In an embodiment, the LSD1 inhibitor is administered after harvest of immune effector cells, e.g., T cells to be engineered to express an CAR molecule, e.g., as described herein, for an amount of time sufficient for one or more of the following to occur:

[0058] 1) an increase in the proportion of naive T cells, e.g., T_{SCM} cells;

[0059] 2) an increase in the number of naive T cells, e.g., T_{SCM} cells;

[0060] 3) a decrease in the number of T_{EM} cells;

[0061] 4) a decrease in the proportion of T_{EM} cells;

[0062] 5) an increase in the proportion of CD45RA+CD62L+ T cells;

[0063] 6) an increase in the number of CD45RA+CD62L+ T cells;

[0064] 7) an increase in the proportion of CD45RA+CCR7+ T cells;

[0065] 8) an increase in the number of CD45RA+CCR7+ T cells;

[0066] 9) a decrease in the proportion of PD-1 positive immune effector cells;

[0067] 10) an increase in the ratio of PD-1 negative immune effector cells/PD-1 positive immune effector cells;

[0068] 11) a decrease in the proportion of PD-1+/Lag3+/Tim3+ immune effector cells;

[0069] 12) an increase in the ratio of PD-1−/Lag3−/Tim3− immune effector cells to PD-1+/Lag3+/Tim3+ immune effector cells;

[0070] 13) an increase in the proliferation of the immune effector cells;

[0071] 14 an increase in the production of cytokines (e.g., IFNg and/or IL-2) from said population of immune effector cells; or

[0072] 15) a combination of two, three, four, five, six, seven, eight, nine, ten, eleven, twelve, thirteen, or more (e.g., all) of the above;

[0073] and wherein 1), 2), 3), 4), 5), 6), 7), 8), 9), 10), 11), 12) 13), 14) or 15) occurs e.g., at least transiently, e.g., permanently, e.g., as compared to a non-treated subject.

[0074] In an embodiment, the LSD1 inhibitor is administered after administration of immune effector cells, e.g., T cells to be engineered to express an CAR molecule, e.g., as described herein, for an amount of time sufficient for one or more of the following to occur:

[0075] 1) an increase in the proportion of naive T cells, e.g., T_{SCM} cells;

[0076] 2) an increase in the number of naive T cells, e.g., T_{SCM} cells;

[0077] 3) a decrease in the number of T_{EM} cells;

[0078] 4) a decrease in the proportion of T_{EM} cells;

[0079] 5) an increase in the proportion of CD45RA+CD62L+ T cells;

[0080] 6) an increase in the number of CD45RA+CD62L+ T cells;

[0081] 7) an increase in the proportion of CD45RA+CCR7+ T cells;

[0082] 8) an increase in the number of CD45RA+CCR7+ T cells;

[0083] 9) a decrease in the proportion of PD-1 positive immune effector cells;

[0084] 10) an increase in the ratio of PD-1 negative immune effector cells/PD-1 positive immune effector cells;

[0085] 11) a decrease in the proportion of PD-1+/Lag3+/Tim3+ immune effector cells;

[0086] 12) an increase in the ratio of PD-1−/Lag3−/Tim3− immune effector cells to PD-1+/Lag3+/Tim3+ immune effector cells;

[0087] 13) an increase in the proliferation of the immune effector cells;

[0088] 14 an increase in the production of cytokines (e.g., IFNg and/or IL-2) from said population of immune effector cells; or

[0089] 15) a combination of two, three, four, five, six, seven, eight, nine, ten, eleven, twelve, thirteen, or more (e.g., all) of the above;

[0090] and wherein 1), 2), 3), 4), 5), 6), 7), 8), 9), 10), 11), 12) 13), 14) or 15) occurs e.g., at least transiently, e.g., permanently, e.g., as compared to a non-treated subject.

[0091] In an embodiment, LSD1 inhibitor is administered to immune effector cells, e.g., T cells, which have, or will be engineered to express a CAR molecule, e.g., as described herein, ex vivo for an amount of time sufficient for one or more of the following to occur:

[0092] 1) an increase in the proportion of naive T cells, e.g., T_{SCM} cells;

[0093] 2) an increase in the number of naive T cells, e.g., T_{SCM} cells;

[0094] 3) a decrease in the number of T_{EM} cells;

[0095] 4) a decrease in the proportion of T_{EM} cells;

[0096] 5) an increase in the proportion of CD45RA+CD62L+ T cells;

[0097] 6) an increase in the number of CD45RA+CD62L+ T cells;

[0098] 7) an increase in the proportion of CD45RA+CCR7+ T cells;

[0099] 8) an increase in the number of CD45RA+CCR7+ T cells;

[0100] 9) a decrease in the proportion of PD-1 positive immune effector cells;

[0101] 10) an increase in the ratio of PD-1 negative immune effector cells/PD-1 positive immune effector cells;

[0102] 11) a decrease in the proportion of PD-1+/Lag3+/Tim3+ immune effector cells;

[0103] 12) an increase in the ratio of PD-1−/Lag3−/Tim3− immune effector cells to PD-1+/Lag3+/Tim3+ immune effector cells;

[0104] 13) an increase in the proliferation of the immune effector cells;

[0105] 14 an increase in the production of cytokines (e.g., IFNg and/or IL-2) from said population of immune effector cells; or

[0106] 15) a combination of two, three, four, five, six, seven, eight, nine, ten, eleven, twelve, thirteen, or more (e.g., all) of the above;

[0107] and wherein 1), 2), 3), 4), 5), 6), 7), 8), 9), 10), 11), 12) 13), 14) or 15) occurs e.g., at least transiently, e.g., permanently, e.g., as compared to a non-treated cell.

[0108] Without being bound by theory, it is believed that LSD1 may also directly demethylate p53 (Nature Reviews Molecular Cell Biology 13, 297-311 (May 2012) doi:10.1038/nrm3327). Thus, in an embodiment, the compounds and methods disclosed herein may be used to inhibit demethylation of p53.

[0109] In an embodiment, the subject has cancer and the method comprises promoting the subject's immune response to the cancer. In an embodiment, the subject was selected on the basis of having cancer. In an embodiment, a cell of the cancer expresses PD-L1 or PD-L2. In an embodiment, a cell in the cancer microenvironment expresses PD-L1 or PD-L2.

[0110] In an embodiment, the cancer comprises a solid tumor. In an embodiment, the cancer is a hematological cancer. In an embodiment, the cancer is a leukemia. In an embodiment, the cancer is a chronic lymphocytic leukemia (CLL). In an embodiment, the cancer is CLL and wherein the antigen binding domain of the CAR targets CD19. In an embodiment, the cancer is melanoma.

[0111] In an embodiment, the method further comprises administering an additional treatment, e.g., a chemotherapeutic, radiation, a cellular therapy, or bone marrow transplant to the subject. In an embodiment, the method further comprises administering an additional treatment that kills T cells, e.g., radiation or cytotoxic chemotherapy. In an embodiment, the method further comprises administering to the subject an mTOR pathway inhibitor, such as vitamin E, vitamin A, an antibacterial antibiotic, an antioxidant, L-carnitine, lipoic acid, metformin, resveratrol, leptine, a non-steroid anti-inflammatory drug, or a COX inhibitor. In an embodiment, the method further comprises administering metformin to the subject. In an embodiment, the LSD1 inhibitor is administered prior to or after the initiation of the additional treatment. In an embodiment, the method further comprises administering an additional treatment for the cancer.

[0112] In an embodiment, the method further comprises administering the immune effector cell, e.g., T cell, engineered to express a CAR molecule, e.g., as described herein, in combination with another agent (in addition to the LSD1 inhibitor). In one embodiment, the agent can be a kinase inhibitor, e.g., a CDK4/6 inhibitor, a BTK inhibitor, an mTOR inhibitor, a MNK inhibitor, or a dual mTOR/PI3K kinase inhibitor, and combinations thereof.

[0113] In an embodiment, the method comprises providing an anti-tumor immunity in a mammal. In one embodiment, the cell is an autologous T cell or an autologous NK cell. In one embodiment, the cell is an allogeneic T cell or an allogeneic NK cell. In one embodiment, the mammal is a human.

[0114] In an embodiment the method comprises treating a mammal having a disease associated with expression of a cancer associated antigen or tumor marker.

[0115] In one embodiment, the method comprises administering an agent that increases the efficacy of the immune effector cell, e.g., T cell or NK cell, engineered to express a CAR molecule, e.g., as described herein, e.g., an agent described herein.

[0116] In one embodiment, the method comprises administering an agent that ameliorates one or more side effect associated with administration of a cell expressing a CAR molecule, e.g., as described herein, the immune effector cell, e.g., T cell or NK cell, engineered to express a CAR molecule, e.g., as described herein, e.g., an agent described herein.

[0117] In one embodiment, the method comprises administering an agent that treats the disease associated with a cancer associated antigen as described herein, e.g., an agent described herein.

[0118] In one embodiment, the immune effector cell, e.g., T cell or NK cell, engineered to express a CAR molecule, e.g., as described herein, expresses two or more CAR molecules and, e.g., is administered to a subject in need thereof to treat cancer.

[0119] In one embodiment, the CAR molecule is introduced into immune effector cells (e.g., T cells, NK cells), e.g., using in vitro transcription, and the subject (e.g., human) receives an initial administration of cells comprising a CAR molecule, and one or more subsequent administrations of cells comprising a CAR molecule, wherein the one or more subsequent administrations are administered less than 15 days, e.g., 14, 13, 12, 11, 10, 9, 8, 7, 6, 5, 4, 3, or 2 days after the previous administration. In one embodiment, more than one administration of cells comprising a CAR molecule are administered to the subject (e.g., human) per week, e.g., 2, 3, or 4 administrations of cells comprising a CAR molecule are administered per week. In one embodiment, the subject (e.g., human subject) receives more than one administration of cells comprising a CAR molecule per week (e.g., 2, 3 or 4 administrations per week) (also referred to herein as a cycle), followed by a week of no administration of cells comprising a CAR molecule, and then one or more additional administrations of cells comprising a CAR molecule (e.g., more than one administration of the cells comprising a CAR molecule per week) are administered to the subject. In another embodiment, the subject (e.g., human subject) receives more than one cycle of cells comprising a CAR molecule, and the time between each cycle is less than 10, 9, 8, 7, 6, 5, 4, or 3 days. In one embodiment, the cells comprising a CAR molecule are administered every other day for 3 administrations per week. In one embodiment, the cells comprising a CAR molecule are administered for at least two, three, four, five, six, seven, eight or more weeks.

[0120] In one embodiment, the immune effector cell, e.g., T cell or NK cell, engineered to express a CAR, e.g., a CAR molecule described herein, is administered as a first line treatment for the disease, e.g., the cancer, e.g., the cancer described herein. In another embodiment, the immune effector cell, e.g., T cell, engineered to express a CAR, e.g., a CAR molecule described herein, is administered as a second, third, fourth line treatment for the disease, e.g., the cancer, e.g., the cancer described herein.

[0121] In one embodiment, a population of cells described herein is administered.

[0122] In one embodiment, the LSD1 inhibitor and the immune effector cell, e.g., a T cell, engineered to express a CAR molecule, e.g., as described herein, are present in a single composition, e.g., are administered as a single composition. In one embodiment, LSD1 inhibitor and the immune effector cell, e.g., a T cell, engineered to express a CAR molecule, e.g., as described herein, are present in separate compositions, e.g., are administered as separate compositions.

[0123] In certain aspects, the disclosure provides an LSD1 inhibitor for use in treating a subject, wherein said LSD1 inhibitor enhances an immune response of said subject, and wherein said subject has received, is receiving or is about to receive an immune effector cell engineered to express a CAR molecule, e.g., as described herein.

[0124] In certain aspects, the disclosure provides an immune effector cell engineered to express a CAR molecule, e.g., as described herein for use in treating a subject, wherein said subject has received, is receiving, or is about to receive, an LSD1 inhibitor, e.g., one that enhances an immune response of said subject.

[0125] In certain aspects, the disclosure provides an immune effector cell engineered to express a CAR molecule, e.g., as described herein for use in treating a subject, wherein said immune effector cell engineered to express a CAR molecule, e.g., as described herein has been contacted with an LSD1 inhibitor, e.g., contacted ex vivo with an LSD1 inhibitor.

[0126] In one embodiment, the invention the population of autologous or allogeneic immune effector cells are transfected or transduced with a vector comprising a nucleic acid molecule encoding a CAR molecule, e.g., as described herein. In one embodiment, the vector is a retroviral vector. In one embodiment, the vector is a self-inactivating lentiviral vector as described elsewhere herein. In one embodiment, the vector is delivered (e.g., by transfecting or electroporating) to a cell, e.g., a T cell or a NK cell, wherein the vector comprises a nucleic acid molecule encoding a CAR molecule, e.g., as described herein, which is transcribed as an mRNA molecule, and the CAR molecule is translated from the RNA molecule and expressed on the surface of the cell.

[0127] In an embodiment, a population of CAR-expressing cells, e.g., CAR-expressing T cells (CART cells) or CAR-expressing NK cells, is administered. In some embodiments, the population of CAR-expressing cells comprises a mixture of cells expressing different CARs. For example, in one embodiment, the population of CAR-expressing cells can include a first cell expressing a CAR having an antigen binding domain that binds to a first tumor marker as described herein, and a second cell expressing a CAR having a different antigen binding domain that binds to a second tumor marker as described herein. As another example, the population of CAR-expressing cells can include a first cell expressing a CAR that includes an antigen binding domain that binds to a tumor marker as described herein, and a second cell expressing a CAR that includes an antigen binding domain to a target other than a tumor marker as described herein. In one embodiment, the population of CAR-expressing cells includes, e.g., a first cell expressing a CAR that includes a primary intracellular signaling domain, and a second cell expressing a CAR that includes a secondary signaling domain.

[0128] In one aspect, the invention features a method of treating a subject (e.g., a subject suffering from a disease, e.g., a disease associated with expression of a tumor antigen, e.g., a cancer), that includes administering an LSD1 inhibitor and a population of immune effector cells engineered to express a chimeric antigen receptor (CAR). In embodiments, the method includes administering the LSD1 inhibitor before the population of immune effector cells. In embodiments, the method includes administering the LSD1 inhibitor concurrently with the population of immune effector cells. In embodiments, the method includes administering the LSD1 inhibitor after the population of immune effector cells. In embodiments, the method includes administering the LSD1 inhibitor (e.g., for an interval) before and after the population of immune effector cells is administered.

[0129] In one aspect, the invention features a method of treating a subject (e.g., a subject suffering from a disease, e.g., a disease associated with expression of a tumor antigen, e.g., a cancer), that includes administering an LSD1 inhibitor to the subject, wherein said subject has received, is receiving or is about to receive a population of immune effector cells engineered to express a chimeric antigen receptor (CAR). In embodiments, the method includes administering to a subject an LSD1 inhibitor and a population of immune effector cells engineered to express a CAR molecule, e.g., as described herein. In embodiments, the LSD1 inhibitor is administered before the population of immune effector cells engineered to express a CAR molecule, e.g., as described herein, and wherein said administration of the LSD1 inhibitor is continued for a period of time after the administration of the population of immune effector cells engineered to express a CAR molecule, e.g., as described herein. In other embodiments, the administration of the LSD1 inhibitor after the administration of the population of immune effector cells engineered to express a CAR molecule, e.g., as described herein is in an amount sufficient to increase an anti-tumor effect of the population of immune effector cells engineered to express a CAR molecule, e.g., as described herein relative to an equivalent population of immune effector cells engineered to express a CAR molecule, e.g., as described herein administered in the absence of said LSD1 inhibitor.

[0130] In another aspect, the invention features a method of increasing the therapeutic efficacy in a subject of a population of immune effector cells engineered to express a CAR molecule, e.g., as described herein, e.g., a CAR19 (e.g., CTL019), including a step of decreasing the activity or expression of LSD1 in said cell, at least transiently. In embodiments, the step of decreasing the activity or expression of LSD1 in said cell includes contacting the cell with an LSD1 inhibitor. In embodiments, the contacting is done ex vivo. In embodiments, the contacting is done in vivo (e.g., the population of immune effector cells and the LSD1 inhibitor are coadministered to the subject).

[0131] In embodiments of any of the foregoing aspect, the administration or the contacting of the LSD1 inhibitor results in:

[0132] 1) an increase in the proportion of naive T cells, e.g., T_{SCM} cells;

[0133] 2) an increase in the number of naive T cells, e.g., T_{SCM} cells;

[0134] 3) a decrease in the number of T_{EM} cells;

[0135] 4) a decrease in the proportion of T_{EM} cells;

[0136] 5) an increase in the proportion of CD45RA+CD62L+ T cells;

[0137] 6) an increase in the number of CD45RA+CD62L+ T cells;

[0138] 7) an increase in the proportion of CD45RA+CCR7+ T cells;

[0139] 8) an increase in the number of CD45RA+CCR7+ T cells;

[0140] 9) a decrease in the proportion of PD-1 positive immune effector cells;

[0141] 10) an increase in the ratio of PD-1 negative immune effector cells/PD-1 positive immune effector cells;

[0142] 11) a decrease in the proportion of PD-1+/Lag3+/Tim3+ immune effector cells;

[0143] 12) an increase in the ratio of PD-1−/Lag3−/Tim3− immune effector cells to PD-1+/Lag3+/Tim3+ immune effector cells;

[0144] 13) an increase in the proliferation of the immune effector cells;

[0145] 14 an increase in the production of cytokines (e.g., IFNg and/or IL-2) from said population of immune effector cells; or

[0146] 15) a combination of two, three, four, five, six, seven, eight, nine, ten, eleven, twelve, thirteen, or more (e.g., all) of the above.

[0147] In embodiments, the effect is transient. In embodiments, the effect is permanent. In embodiments, the effect is as compared to cells not contacted with the LSD1 inhibitor. In embodiments, the effect is as compared to cells of the same subject not contacted with the LSD1 inhibitor.

[0148] In another aspect, the invention provides a method of treating a subject that includes:
[0149] a) administering an LSD1 inhibitor to a subject;
[0150] b) collecting a population of immune effector cells from the subject of a), after said administration of the LSD1 inhibitor;
[0151] c) providing said population of immune effector cells ex vivo;
[0152] d) contacting said ex vivo population of immune effector cells with the LSD1 inhibitor, wherein the contacting with the LSD1 inhibitor causes one or more of the following to occur:

[0153] 1) an increase in the proportion of naive T cells, e.g., T_{SCM} cells;

[0154] 2) an increase in the number of naive T cells, e.g., T_{SCM} cells;

[0155] 3) a decrease in the number of T_{EM} cells;

[0156] 4) a decrease in the proportion of T_{EM} cells;

[0157] 5) an increase in the proportion of CD45RA+CD62L+ T cells;

[0158] 6) an increase in the number of CD45RA+CD62L+ T cells;

[0159] 7) an increase in the proportion of CD45RA+CCR7+ T cells;

[0160] 8) an increase in the number of CD45RA+CCR7+ T cells;

[0161] 9) a decrease in the proportion of PD-1 positive immune effector cells;

[0162] 10) an increase in the ratio of PD-1 negative immune effector cells/PD-1 positive immune effector cells;

[0163] 11) a decrease in the proportion of PD-1+/Lag3+/Tim3+ immune effector cells;

[0164] 12) an increase in the ratio of PD-1−/Lag3−/Tim3− immune effector cells to PD-1+/Lag3+/Tim3+ immune effector cells;

[0165] 13) an increase in the proliferation of the immune effector cells;

[0166] 14 an increase in the production of cytokines (e.g., IFNg and/or IL-2) from said population of immune effector cells; or

[0167] 15) a combination of two, three, four, five, six, seven, eight, nine, ten, eleven, twelve, thirteen, or more (e.g., all) of the above;

[0168] and e) administering the population of immune effector cells to a subject.

[0169] In embodiments, the effect of d) is transient. In embodiments, the effect of d) is permanent. In embodiments, the effect of d) is as compared to cells not contacted with the LSD1 inhibitor. In embodiments, the administering of step e) is to the same subject as the subject of step b) (e.g., relates to a method of treatment using a population of autologous immune effector cells). In embodiments, the administering of step e) is to a different subject, e.g., of the same species, as the subject of step b) (e.g., relates to a method of treatment using a population of allogeneic immune effector cells).

[0170] In embodiments, step of e) further includes administering the LSD1 inhibitor to the subject. In embodiments, the method further includes the step of inserting nucleic acid that encodes a CAR molecule, e.g., as described herein into cells of the ex vivo population of immune effector cells.

[0171] In another aspect, the invention features the use of LSD1 inhibitors in the manufacture of a population of immune effector cells, e.g., engineered to express a CAR molecule, e.g., as described herein. In one aspect, the invention provides a method of making a population of immune effector cells, which is optionally a population of T cells, including the steps of:

[0172] a) contacting a population of immune effector cells with an LSD1 inhibitor;

[0173] thereby making a population of immune effector cells, which is optionally a population of T cells,

[0174] wherein the contacting with the LSD1 inhibitor causes one or more of the following to occur:

[0175] 1) an increase in the proportion of naive T cells, e.g., T_{SCM} cells;

[0176] 2) an increase in the number of naive T cells, e.g., T_{SCM} cells;

[0177] 3) a decrease in the number of T_{EM} cells;

[0178] 4) a decrease in the proportion of T_{EM} cells;

[0179] 5) an increase in the proportion of CD45RA+CD62L+ T cells;

[0180] 6) an increase in the number of CD45RA+CD62L+ T cells;

[0181] 7) an increase in the proportion of CD45RA+CCR7+ T cells;

[0182] 8) an increase in the number of CD45RA+CCR7+ T cells;

[0183] 9) a decrease in the proportion of PD-1 positive immune effector cells;

[0184] 10) an increase in the ratio of PD-1 negative immune effector cells/PD-1 positive immune effector cells;

[0185] 11) a decrease in the proportion of PD-1+/Lag3+/Tim3+ immune effector cells;

[0186] 12) an increase in the ratio of PD-1−/Lag3−/Tim3− immune effector cells to PD-1+/Lag3+/Tim3+ immune effector cells;

[0187] 13) an increase in the proliferation of the immune effector cells;

[0188] 14 an increase in the production of cytokines (e.g., IFNg and/or IL-2) from said population of immune effector cells; or

[0189] 15) a combination of two, three, four, five, six, seven, eight, nine, ten, eleven, twelve, thirteen, or more (e.g., all) of the above.

[0190] In embodiments, the effect of 1)-15) is transient. In embodiments, the effect of 1)-15) is permanent. In embodiments, the effect of 1)-15) is as compared to cells not contacted with the LSD1 inhibitor.

[0191] In embodiments, the method further includes the step of b) inserting nucleic acid that encodes a CAR molecule, e.g., as described herein, into cells of the population of immune effector cells. In embodiments, the contacting of step a) occurs

[0192] 1) prior to;

[0193] 2) concurrently with;

[0194] 3) after; or

[0195] 4) both before and after;

[0196] said inserting of step b). In embodiments, the contacting of step a), and optionally the inserting of step b), is ex vivo.

[0197] In another aspect, the invention features cells, e.g., immune effector cells, e.g., a population of immune effector cells, e.g., engineered to express a CAR molecule, e.g., as described herein, made by any of the methods described in the foregoing aspects.

[0198] In another aspect, the invention features a population of immune effector cells engineered to express a CAR molecule, e.g., as described herein, wherein the CAR includes an antigen-binding domain, a transmembrane domain, and an intracellular signaling domain, and wherein expression and/or function of LSD1 in said cell has been reduced or eliminated. In an embodiment, the reduction or elimination is at least transient. In embodiments, the population of immune effector cells has been contacted with an LSD1 inhibitor. In embodiments the invention features a composition comprising the population of immune effector cells described above and an LSD1 inhibitor.

[0199] In any of the foregoing aspects and embodiments, the cells and/or population of cells are (or include) immune effector cells, e.g., the population of immune effector cells includes, e.g., consists of, T cells or NK cells. In embodiments, the cells are T cells, e.g., CD8+ T cells, CD4+ T cells, or a combination thereof. In embodiments, the cells are NK cells.

[0200] In embodiments, the cells are human cells. In embodiments, the cells are autologous, e.g., to the subject to be administered the cells. In embodiments, the cells are allogeneic, e.g., to the subject to be administered the cells.

[0201] In embodiments, the cells are, or include, cells engineered to express a CAR molecule, e.g., as described herein.

[0202] In any of the foregoing aspects and embodiments involving a CAR, the CAR includes an antigen binding domain (which is optionally an antibody or antibody fragment, TCR or TCR fragment), a transmembrane domain, and an intracellular signaling domain (which is optionally an intracellular signaling domain including a costimulatory domain and/or a primary signaling domain). In embodiments, the antigen-binding domain binds to a tumor antigen is selected from a group consisting of: TSHR, CD19, CD123, CD22, CD30, CD171, CS-1, CLL-1, CD33, EGFRvIII, GD2, GD3, BCMA, Tn Ag, PSMA, ROR1, FLT3, FAP, TAG72, CD38, CD44v6, CEA, EPCAM, B7H3, KIT, IL-13Ra2, Mesothelin, IL-11Ra, PSCA, PRSS21, VEGFR2, LewisY, CD24, PDG FR-beta, SSEA-4, CD20, Folate receptor alpha, ERBB2 (Her2/neu), MUC1, EGFR, NCAM, Prostase, PAP, ELF2M, Ephrin B2, IGF-I receptor, CAIX, LMP2, gp100, bcr-abl, tyrosinase, EphA2, Fucosyl GM1, sLe, GM3, TGS5, HMWMAA, o-acetyl-GD2, Folate receptor beta, TEM1/CD248, TEM7R, CLDN6, GPRC5D, CXORF61, CD97, CD179a, ALK, Polysialic acid, PLAC1, GloboH, NY-BR-1, UPK2, HAVCR1, ADRB3, PANX3, GPR20, LY6K, OR51E2, TARP, WT1, NY-ESO-1, LAGE-1a, MAGE-A1, legumain, HPV E6, E7, MAGE A1, ETV6-AML, sperm protein 17, XAGE1, Tie 2, MAD-CT-1, MAD-CT-2, Fos-related antigen 1, p53, p53 mutant, prostein, survivin and telomerase, PCTA-1/Galectin 8, MelanA/MART1, Ras mutant, hTERT, sarcoma translocation breakpoints, ML-IAP, ERG (TMPRSS2 ETS fusion gene), NA17, PAX3, Androgen receptor, Cyclin B1, MYCN, RhoC, TRP-2, CYP1B1, BORIS, SART3, PAX5, OY-TES1, LCK, AKAP-4, SSX2, RAGE-1, human telomerase reverse transcriptase, RU1, RU2, intestinal carboxyl esterase, mut hsp70-2, CD79a, CD79b, CD72, LAIR1, FCAR, LILRA2, CD300LF, CLEC12A, BST2, EMR2, LY75, GPC3, FCRL5, and IGLL1. In one embodiment, the antigen binding domain binds CD19, e.g., is an antigen binding domain as described in, e.g., WO2012/079000 or WO2014/153270. In one embodiment, the antigen binding domain binds BCMA, e.g., is an antigen binding domain as described in, e.g., WO2016/014565, e.g., is the antigen binding domain of CAR BCMA-10 (139109) from WO2016/014565.

[0203] In embodiments, the antigen-binding domain is an antibody or antibody fragment comprising:

[0204] (i) the amino acid sequence of a CD19 binding domain according to Tables 6-9, e.g., the amino acid sequence of CTL019 scFv domain according to Table 9 or an amino acid sequence according to SEQ ID NO: 957, or an amino acid sequence at least 95% identical thereto;

[0205] (ii) the amino acid sequence of a humanized CD19 binding domain according to Tables 6-9, e.g., the amino acid sequence of CAR2 scFv domain according to Table 9 or an amino acid sequence according to SEQ ID NO: 898, or an amino acid sequence at least 95% identical thereto; or

[0206] (iii) the amino acid sequence of a BCMA binding domain according to Tables 11A-11B, e.g., the amino acid sequence of 139109 scFv domain according to Table 11A or an amino acid sequence according to SEQ ID NO: 967, or an amino acid sequence at least 95% identical thereto.

[0207] In embodiments, the transmembrane domain includes:

[0208] (i) an amino acid sequence having at least one, two or three modifications but not more than 20, 10 or 5 modifications of an amino acid sequence of SEQ ID NO: 12, or a sequence with 95-99% identity to an amino acid sequence of SEQ ID NO: 12; or

[0209] (ii) the sequence of SEQ ID NO: 12.

[0210] In embodiments, the antigen binding domain is connected to the transmembrane domain by a hinge region, wherein said hinge region includes SEQ ID NO: 2 or SEQ ID NO: 6, or a sequence with 95-99% identity thereof.

[0211] In embodiments, the intracellular signaling domain includes a primary signaling domain and/or a costimulatory signaling domain, wherein the primary signaling domain includes a functional signaling domain of a protein chosen from CD3 zeta, CD3 gamma, CD3 delta, CD3 epsilon, common FcR gamma (FCER1G), FcR beta (Fc Epsilon R1b), CD79a, CD79b, Fcgamma RIIa, DAP10, or DAP12.

[0212] In embodiments, the primary signaling domain includes:

[0213] (i) an amino acid sequence having at least one, two or three modifications but not more than 20, 10 or 5 modifications of an amino acid sequence of SEQ ID NO: 18 or SEQ ID NO: 20, or a sequence with 95-99% identity to an amino acid sequence of SEQ ID NO: 18 or SEQ ID NO: 20; or

[0214] (ii) the amino acid sequence of SEQ ID NO:18 or SEQ ID NO: 20.

[0215] In embodiments, the intracellular signaling domain includes a costimulatory signaling domain, or a primary signaling domain and a costimulatory signaling domain, wherein the costimulatory signaling domain includes a functional signaling domain of a protein selected from the group consisting of CD27, CD28, 4-1BB (CD137), OX40, CD30, CD40, PD-1, ICOS, lymphocyte function-associated antigen-1 (LFA-1), CD2, CD7, LIGHT, NKG2C, B7-H3, a ligand that specifically binds with CD83, CDS, ICAM-1, GITR, BAFFR,

[0216] HVEM (LIGHTR), SLAMF7, NKp80 (KLRF1), CD160, CD19, CD4, CD8alpha, CD8beta, IL2R beta, IL2R gamma, IL7R alpha, ITGA4, VLA1, CD49a, ITGA4, IA4, CD49D, ITGA6, VLA-6, CD49f, ITGAD, CD11d, ITGAE, CD103, ITGAL, CD11a, LFA-1, ITGAM, CD11b, ITGAX, CD11c, ITGB1, CD29, ITGB2, CD18, LFA-1, ITGB7, TNFR2, TRANCE/RANKL, DNAM1 (CD226), SLAMF4 (CD244, 2B4), CD84, CD96 (Tactile), CEACAM1, CRTAM, Ly9 (CD229), CD160 (BY55), PSGL1, CD100 (SEMA4D), CD69, SLAMF6 (NTB-A, Ly108), SLAM (SLAMF1, CD150, IPO-3), BLAME (SLAMF8), SELPLG (CD162), LTBR, LAT, GADS, SLP-76, PAG/Cbp, NKp44, NKp30, NKp46, and NKG2D, e.g., the costimulatory signaling domain includes an amino acid sequence having at least one, two or three modifications but not more than 20, 10 or 5 modifications of an amino acid sequence of SEQ ID NO:14 or SEQ ID NO: 16, or a sequence with 95-99% identity to an amino acid sequence of SEQ ID NO:14 or SEQ ID NO: 16, e.g., the costimulatory signaling domain includes a sequence of SEQ ID NO: 14 or SEQ ID NO: 16, e.g., the intracellular domain includes the sequence of SEQ ID NO: 14 or SEQ ID NO: 16, and the sequence of SEQ ID NO: 18 or SEQ ID NO: 20, wherein the sequences including the intracellular signaling domain are expressed in the same frame and as a single polypeptide chain.

[0217] In embodiments, the CAR includes a leader sequence including, e.g., consisting of, SEQ ID NO: 2.

[0218] In embodiments, the CAR comprises:

[0219] (i) the amino acid sequence of a CD19 CAR according to Tables 6-9, e.g., the amino acid sequence of CTL019 according to Table 9 or an amino acid sequence according to SEQ ID NO: 956 or an amino acid sequence at least 95% identical thereto;

[0220] (ii) the amino acid sequence of a humanized CD19 CAR according to Tables 6-9, e.g., the amino acid sequence of CAR2 according to Table 9 or an amino acid sequence according to SEQ ID NO: 902, or an amino acid sequence at least 95% identical thereto; or

[0221] (iii) the amino acid sequence of a BCMA CAR according to Tables 11A-11B e.g., the amino acid sequence of 139109 CAR according to Table 11A or an amino acid sequence according to SEQ ID NO: 971, or an amino acid sequence at least 95% identical thereto.

[0222] In any of the foregoing aspects and embodiments, the LSD1 inhibitor may be: (1) a gene editing system targeted to one or more sites of the LSD1 gene, or its corresponding regulatory elements; (2) a nucleic acid (e.g., an siRNA or shRNA, or antisense oligonucleotide) including sequence complementary to a target sequence of the LSD1 gene; (3) a protein (e.g., a dominant negative LSD1, e.g., catalytically inactive LSD1, or a dominant negative binding partner of LSD1); (4) a small molecule; (5) a nucleic acid encoding any of (1)-(3); or (6) any combination of (1)-(5).

[0223] In one aspect, the LSD1 inhibitor is an shRNA or siRNA. In embodiments, the LSD1 inhibitor is a shRNA. In embodiments, the LSD1 inhibitor is as siRNA. In embodiments, the shRNA or siRNA includes sequence complementary to a target sequence of the LSD1 gene (KDM1A), e.g., listed in Table 1, e.g., selected from SEQ ID NO: [43] to SEQ ID NO: [82].

[0224] In another aspect, the LSD1 inhibitor is an shRNA encoded by nucleic acid including any sequence encoding an anti-LSD1 shRNA of Table 1, e.g., encoded by nucleic acid including a sequence selected from SEQ ID NO: [83] to SEQ ID NO: [122].

[0225] In another aspect, the LSD1 inhibitor is nucleic acid including any sequence encoding an anti-LSD1 shRNA of Table 1, e.g., a sequence selected from SEQ ID NO: [83] to SEQ ID NO: [122].

[0226] In another aspect, the LSD1 inhibitor is an antisense oligonucleotide. In embodiments, the antisense oligonucleotide includes sequence that is complementary to a sequence of an LSD1 mRNA. In embodiments, the antisense oligonucleotide includes sequence that is complementary to a sequence of an LSD1 pre-mRNA.

[0227] In embodiments, the nucleic acid encoding the LSD1 inhibitor is disposed on a vector, e.g., a vector further including a U6 or H1 promoter operably linked to said nucleic acid, e.g., a retroviral vector, a lentiviral vector, an adenoviral vector, an adeno-associated viral (AAV) vector, a herpes simplex virus (HSV) vector, a plasmid, a minicircle, a nanoplasmid, or an RNA vector. In embodiments the vector further includes sequence encoding a CAR molecule.

[0228] In another aspect, the LSD1 inhibitor is a genome editing system specific for a sequence of the LSD1 gene (KDM1A) or its regulatory elements selected from a CRISPR genome editing system, a zinc finger nuclease genome editing system, a TALEN genome editing system and a meganuclease genome editing system.

[0229] In another aspect, the LSD1 inhibitor is a CRISPR genome editing system including a gRNA molecule including a targeting domain complementary to a sequence of the LSD1 gene (KDM1A) or its regulatory elements, e.g., including any one of SEQ ID NO: [132] to [862].

[0230] In other aspect, the LSD1 inhibitor is a small molecule. In embodiments, the small molecule is a reversible LSD1 inhibitor. In embodiments, the small molecule is an irreversible LSD1 inhibitor. In embodiments, the small molecule LSD1 inhibitor is:

[0231] a) GSK2699537;

[0232] b) rel-2-[[(1R,2S)-2-[4-[(4-chlorophenyl)methoxy]phenyl]cyclopropyl]amino]-1-(4-methyl-1-piperazinyl)-ethanone (described in PCT Publication No. WO 2010043721);

[0233] c) (R)-4-(5-(pyrrolidin-3-ylmethoxy)-2-(p-tolyl)pyridin-3-yl)benzonitrile;

[0234] d) (1S,2R)—N-((2-methoxypyridin-3-yl)methyl)-2-phenylcyclopropan-1-amine;

[0235] e) N,N-dimethyl-1-((4-(4-(4-(piperidin-4-yl)phenyl)-1H-indazol-1-yl)phenyl)sulfonyl)piperidin-4-amine;

[0236] f) 5-(6-chloro-4′-(methylsulfonyl)-[1,1′-biphenyl]-3-yl)-2-(piperazin-1-yl)-1H-pyrrole-3-carbonitrile;

[0237] g) rel-N-[(1R,2S)-2-Phenylcyclopropyl]-4-Piperidinamine; or

[0238] h) 2-(1R,2S)-2-(4-(Benzyloxy)phenyl)cyclopropylamino)-1-(4-methylpiperazin-1-yl)ethanone;

[0239] i) Trans-3-(3-amino-2-methylphenyl)-1-(4-hydroxycyclohexyl)-6-methyl-1H-indole-5-carbonitrile;

or

[0240] j) a pharmaceutically acceptable salt of any of the foregoing. In embodiments, the LSD1 inhibitor is a small molecule and said LSD1 inhibitor is conjugated to an antibody or antigen-binding fragment thereof, e.g., an antibody or antigen-binding fragment thereof that recognizes an antigen on the surface of a T cell, e.g., CD3.

[0241] In another aspect, the LSD1 inhibitor is a protein, e.g., is a dominant negative binding partner of LSD1 (e.g., a histone deacetylase (HDAC) that interacts with LSD1 or other member of the Co-REST or AR co-activator complex), or nucleic acid encoding said dominant negative binding partner of LSD1.

[0242] In another aspect, the inhibitor of LSD1 is a protein, e.g., is a dominant negative (e.g., catalytically inactive) LSD1, or nucleic acid encoding said dominant negative LSD1.

[0243] In another aspect, the invention provides a method of treating a subject in need thereof, including administering to said subject an effective amount of the population of immune effector cells of any of the previous aspects and embodiments. In embodiments, the method further includes administering to said subject an LSD1 inhibitor. In embodiments, the subject receives a pre-treatment of an LSD1 inhibitor, prior to the administration of the population of immune effector cells; In embodiments, the subject receives concurrent treatment with an LSD1 inhibitor and the population of immune effector cells; In embodiments, the subject receives treatment with an LSD1 inhibitor after administration of the population of immune effector cells; In embodiments, the subject receives a combination of any of the foregoing.

[0244] In an aspect, including in the previous aspects relating to methods of treatment, the invention relates to methods of treating a subject, wherein the subject has a disease associated with expression of a tumor antigen, e.g., a proliferative disease, a precancerous condition, a cancer, or a non-cancer related indication associated with expression of the tumor antigen. In embodiments, the cancer is a hematologic cancer chosen from one or more of chronic lymphocytic leukemia (CLL), acute leukemias, acute lymphoid leukemia (ALL), acute myeloid leukemia (AML), B-cell acute lymphoid leukemia (B-ALL), T-cell acute lymphoid leukemia (T-ALL), chronic myelogenous leukemia (CML), B cell prolymphocytic leukemia, blastic plasmacytoid dendritic cell neoplasm, Burkitt's lymphoma, diffuse large B cell lymphoma, follicular lymphoma, hairy cell leukemia, small cell- or a large cell-follicular lymphoma, malignant lymphoproliferative conditions, MALT lymphoma, mantle cell lymphoma, marginal zone lymphoma, multiple myeloma, myelodysplasia and myelodysplastic syndrome, non-Hodgkin's lymphoma, Hodgkin's lymphoma, plasmablastic lymphoma, plasmacytoid dendritic cell neoplasm, Waldenstrom macroglobulinemia, or pre-leukemia. In embodiments, the cancer is selected from the group consisting of colon cancer, rectal cancer, renal-cell carcinoma, liver cancer, non-small cell carcinoma of the lung, cancer of the small intestine, cancer of the esophagus, melanoma, bone cancer, pancreatic cancer, skin cancer, cancer of the head or neck, cutaneous or intraocular malignant melanoma, uterine cancer, ovarian cancer, rectal cancer, cancer of the anal region, stomach cancer, testicular cancer, uterine cancer, carcinoma of the fallopian tubes, carcinoma of the endometrium, carcinoma of the cervix, carcinoma of the vagina, carcinoma of the vulva, Hodgkin's Disease, non-Hodgkin's lymphoma, cancer of the endocrine system, cancer of the thyroid gland, cancer of the parathyroid gland, cancer of the adrenal gland, sarcoma of soft tissue, cancer of the urethra, cancer of the penis, solid tumors of childhood, cancer of the bladder, cancer of the kidney or ureter, carcinoma of the renal pelvis, neoplasm of the central nervous system (CNS), primary CNS lymphoma, tumor angiogenesis, spinal axis tumor, brain stem glioma, pituitary adenoma, Kaposi's sarcoma, epidermoid cancer, squamous cell cancer, T-cell lymphoma, environmentally induced cancers, combinations of said cancers, and metastatic lesions of said cancers.

[0245] In another aspect, the invention provides novel compounds. Such compounds are useful, for example, in the methods and compositions described herein, but such uses and compositions are not intended to be limiting. In an embodiment, the invention provides a compound selected from N,N-dimethyl-1-((4-(4-(4-(piperidin-4-yl)phenyl)-1H-indazol-1-yl)phenyl)sulfonyl)piperidin-4-amine and 5-(6-chloro-4′-(methylsulfonyl)biphenyl-3-yl)-2-(piperazin-1-yl)-1H-pyrrole-3-carbonitrile. In an embodiment, the invention provides N,N-dimethyl-1-((4-(4-(4-(piperidin-4-yl)phenyl)-1H-indazol-1-yl)phenyl)sulfonyl)piperidin-4-amine. In an embodiment, the invention provides 5-(6-chloro-4′-(methylsulfonyl)biphenyl-3-yl)-2-(piperazin-1-yl)-1H-pyrrole-3-carbonitrile. The invention further provides a pharmaceutically acceptable salt of any of the foregoing. The invention further provides a compound described above, for use in the manufacture of a medicament. The invention further provides a compound described above, for use as a medicament. The invention further provides a compound described above, for use in the manufacture of a medicament for use as an LSD1 inhibitor, e.g., for use as an LSD1 inhibitor in any of the methods described herein. In an embodiment, the invention provides a compound described above, for use in therapy, alone, or optionally in combination with at least another agent.

[0246] In another aspect, the invention provides a composition for use in ex vivo manufacturing a population of immune effector cells, that includes an LSD1 inhibitor, e.g., a small molecule LSD1 inhibitor. In embodiments, the composition includes the small molecule LSD1 inhibitor at a concentration of ranges from about 0.001 nM to about 10 mM, e.g., from about 0.001 nM to about 100 nM, or from, e.g., about 0.1 uM to about 10 uM.

[0247] In an aspect, the invention provides an LSD1 inhibitor, for use in treating a subject, wherein said subject has received, is receiving, or is about to receive therapy including an immune effector cell, e.g., an immune effector cell engineered to express a CAR molecule, e.g., as described herein.

[0248] In an aspect, the invention provides an LSD1 inhibitor, for use in the manufacture of an immune effector cell, e.g., an immune effector cell engineered to express a CAR molecule, e.g., as described herein.

[0249] In an aspect, the invention provides a method of manufacturing an immune effector cell, e.g., a population of immune effector cells, that includes introducing into said cells nucleic acid encoding a CAR molecule, e.g., as described herein, wherein the nucleic acid integrates into the genome of said cell within the LSD1 gene, such that LSD1 expression and/or function is reduced.

### BRIEF DESCRIPTION OF THE DRAWINGS

[0250] FIG. 1 depicts the percentage of CD8+ T cells from human donors that are CD45RA+CD62L+ after activation using CD3/CD28 in the presence of an LSD1 inhibitor shRNA (molecules 1A, 1B, 2, 3A, 3B, 4 or 6A) compared to control.

[0251] FIG. 2 depicts the percentage of CD4+ T cells from human donors that are CD45RA+CD62L+ after activation using CD3/CD28 in the presence of an LSD1 inhibitor shRNA (molecules 1A, 1B, 2, 3A, 3B, 4 or 6A) compared to control.

[0252] FIG. 3A shows the ability of the indicated compounds to produce T cells of a given phenotype was assessed. Naive human T cells (peripheral pan CD3+ T cells, pooled population) were isolated by negative selection and expanded with anti-CD3/CD28 beads at a 3:1 ratio for 10 days in the presence of the indicated compounds. Compounds were refreshed every 2 days. Following expansion, T cell phenotypes were determined by FACS staining. LSD1 inhibition significantly enhanced the percentage of Tscm cells while reducing the percentage of Tem cells in CD4+ T cells relative to controls and relative to other known conditions.

[0253] FIG. 3B shows the ability of the indicated compounds to produce T cells of a given phenotype was assessed. Naive human T cells (peripheral pan CD3+ T cells, pooled population) were isolated by negative selection and expanded with anti-CD3/CD28 beads at a 3:1 ratio for 10 days in the presence of the indicated compounds. Compounds were refreshed every 2 days. Following expansion, T cell phenotypes were determined by FACS staining. LSD1 inhibition significantly enhanced the percentage of T_{SCM} cells while reducing the percentage of Tem cells in CD8+ T cells relative to controls and relative to other known conditions.

[0254] FIG. 4A shows the effect of LSD1 inhibition in comparison to other compounds believed to affect T cell phenotype on T_{SCM} to T_{EM} ratio in CD4+ cells.

[0255] FIG. 4B shows the effect of LSD1 inhibition in comparison to other compounds believed to affect T cell phenotype on T_{SCM} to T_{EM} ratio in CD8+ cells.

[0256] FIG. 5 shows the expansion of T cells using CD3/CD28 stimulation in the presence of LSD1 inhibitors.

[0257] FIG. 6 shows the expression of checkpoint proteins PD1, Tim3 and Lag3 on T cells expanded in the presence of LSD1 inhibitors.

[0258] FIG. 7 shows the level of CAR expression on T cells expanded in the presence of LSD1 inhibitors.

[0259] FIG. 8 shows the proportion of CD4+ and CD8+ CART and untransduced T cells in the presence of LSD1 inhibitors.

[0260] FIG. 9 shows the expansion of CART cells and untransduced T cells in the presence of LSD1 inhibitors.

[0261] FIG. 10 shows the cytokine production from CART cells expanded in the presence of LSD1 inhibitors, and then exposed to CD19+ or CD19− tumor cells.

[0262] FIG. 11 shows the effect of LSD1 inhibition in significantly increased proliferative capacity following CAR stimulation. Naive human T cells (peripheral pan CD3+ T cells, pooled population) were isolated from PBMCs by negative selection and expanded with anti-CD3/CD28 beads at a 3:1 ratio for 10 days in the presence of the indicated compounds. T cells were transduced with an anti-CD19 scFV on day 1. Compounds were refreshed every 2 days until day 10 was washed out prior to functional assays. Following expansion, T cells were mixed with CD19+ tumor cells lines NALM6 and Raji, as well as CD19− tumor cell line K562. Tumor cells were irradiated and T cells and tumor cells were mixed at a 1:1 ratio. On day 4 following incubation, T cells were stained for CAR using Protein L and CAR+ T cell numbers were determined by FACS using countbright beads. Proliferation was measured as the number of FACS positive cells detected in the period of time used to count 2500 beads. Data expressed as fold no target (CD19−) control (K562).

[0263] FIG. 12 shows the effects of the indicated compounds on naive human T cells (peripheral pan CD3+ T cells, pooled population) isolated by negative selection from PBMCs and expanded with anti-CD3/CD28 beads at a 3:1 ratio for 10 days in the presence of the indicated compounds. T cells were transduced with an anti-CD19 scFV on day 1. Compounds were refreshed every 2 days until day 10 was washed out prior to functional assays. Following expansion, T cell killing of the luciferized CD19+ NALM6 tumor cell line was assessed. After 20 hours luciferase signal was measured using the Bright-Glo™ Luciferase Assay on the EnVision instrument.

[0264] FIG. 13 shows the in vivo anti-tumor efficacy of CART cells expanded ex vivo in the presence of LSD1 inhibitors.

[0265] FIG. 14A shows the level of expansion of CD4+ T cells (e.g., T_{SCM}) cells in the presence of LSD1 inhibitors.

[0266] FIG. 14B shows the level of expansion of CD8+ T cells (e.g., T_{SCM}) cells in the presence of LSD1 inhibitors.

[0267] FIG. 15A shows the level of expression of checkpoint proteins PD1, Tim3 and Lag3 on CD4+ T cells expanded in the presence of LSD1 inhibitors.

[0268] FIG. 15B shows the level of expression of checkpoint proteins PD1, Tim3 and Lag3 on CD8+ T cells expanded in the presence of LSD1 inhibitors.

[0269] FIG. 16 depicts the percentage of total T cells expressing PD1, Tim3 or Lag3 (left panel) or co-expressing PD1/Lag3 or PD1/Lag3/Tim3 after expansion in the presence or absence of LSD1 inhibitor.

[0270] FIG. 17 depicts the percentage of CD4+ T cells (left panel) and percentage of CD8+ T cells (right panel) which are Tscm after expansion in the presence or absence of LSD1 inhibitor.

[0271] FIG. 18 depicts the percentage of CD4+ T cells (left panel) and percentage of CD8+ T cells (right panel) which are positive for co-expression of Tim3/Lag3/PD-1 after expansion in the presence or absence of LSD1 inhibitor.

[0272] FIG. 19 depicts an illustration of gating strategy for Tscm, Tcm and Tem by flow cytometry analysis.

[0273] FIG. 20 depicts the effects of different concentrations of LSD1 inhibitors on the T cell phenotypic changes after 10 day activation, treatment and expansion in culture. Percentage of Tscm, Tem and Tcm of CD3+ T cells, as well as the ratio of subset CD8+/CD4+, Tscm/Tem, and Tscm/Tcm are shown.

[0274] FIG. 21 depicts a dose response curve of the compound 93 (NVS Compound 1) on the subset of CD8+ and CD4+ T cells on induction of Tscm, Tem and Tcm.

[0275] FIG. 22 depicts a dose response curve of the LSD1i-GSK on the subset of CD8+ and CD4+ T cells on induction of Tscm, Tem and Tcm.

[0276] FIG. 23 depicts a dose response curve of the compound 93 and LSD1i-GSK on the CD3+ and CD8+ T cells on induction of Tscm (EC50 shown).

[0277] FIG. 24 shows that Compound A and Compound B showed similar effects on inducing Tscm and reducing Tem at 100 nM started dosing 24 h after activation, when compared with Compound 93.

[0278] FIG. 25 depicts an illustration of gating strategy for Tscm, Tcm and Tem in total T cell and CAR+ T cells by flow cytometry analysis.

[0279] FIG. 26 shows FACS analyses for total CD3+ T cells, CAR expression, and CD8+ CAR+ vs CD4+ CAR+ ratio in the final CART product in response to different concentrations of LSD1 inhibition by Compound 93.

[0280] FIG. 27 shows FACS analyses for Tscm, Tem, Tcm in the total CD8+ T cells of the final CART products in response to different concentrations of LSD1 inhibition by Compound 93.

[0281] FIG. 28 shows FACS analyses for the percentage of Tscm, Tem, Tcm in the CAR+CD8+ T cells in response to different concentrations of LSD1 inhibition by Compound 93.

[0282] FIG. 29 shows results from in vitro cytokine assay for IFNg secretion by CART cells with or without LSD1 inhibitor treatment in response to their specific tumor target cells line at an effector to target cells ratio 1.25:1 incubation for 20 hours.

[0283] FIG. 30 shows in vitro CD3+(total) and CD3+CAR+ cell proliferation levels in response to their specific irradiated tumor cells lines at an effector to target cells ratio 1:1 for 4 days.

[0284] FIG. 31 shows in vitro CD8+ and CD8+CAR+ T cell proliferation levels in response to their specific irradiated tumor cells lines at an effector to target cells ratio 1:1 for 4 days.

[0285] FIG. 32 shows in vitro CD4+ and CD4+CAR+ T cell proliferation levels in response to their specific irradiated tumor cells lines at an effector to target cells ratio 1:1 for 4 days.

[0286] FIG. 33 shows in vivo anti-tumor efficacy of BCMA CART cells against BCMA+ tumor line. UTD=T cells that were not transduced with the CAR gene; LSDi=indicates those populations that were expanded ex vivo in the presence of Compound 93; BCMA 0.167 million=indicates those populations which were transduced with the CAR gene, and the number of CAR+ cells in the population; PBS=no cell control (phosphate buffered saline injection only).

### DETAILED DESCRIPTION

### Definitions

[0287] Unless defined otherwise, all technical and scientific terms used herein have the same meaning as commonly understood by one of ordinary skill in the art to which the invention pertains.

[0288] The term “a” and “an” refers to one or to more than one (i.e., to at least one) of the grammatical object of the article. By way of example, “an element” means one element or more than one element.

[0289] The term “about” when referring to a measurable value such as an amount, a temporal duration, and the like, is meant to encompass variations of ±20% or in some instances ±10%, or in some instances ±5%, or in some instances ±1%, or in some instances ±0.1% from the specified value, as such variations are appropriate to perform the disclosed methods.

[0290] The term “Chimeric Antigen Receptor” or alternatively a “CAR” refers to a set of polypeptides, typically two in the simplest embodiments, which when in an immune effector cell, provides the cell with specificity for a target cell, typically a cancer cell, and with intracellular signal generation. In some embodiments, a CAR comprises at least an extracellular antigen binding domain, a transmembrane domain and a cytoplasmic signaling domain (also referred to herein as “an intracellular signaling domain”) comprising a functional signaling domain derived from a stimulatory molecule and/or costimulatory molecule as defined below. In some aspects, the set of polypeptides are contiguous with each other. In some embodiments, the set of polypeptides includes a dimerization switch that, upon the presence of a dimerization molecule, can couple the polypeptides to one another, e.g., can couple an antigen binding domain to an intracellular signaling domain. In one aspect, the stimulatory molecule is the zeta chain associated with the T cell receptor complex. In one aspect, the cytoplasmic signaling domain further comprises one or more functional signaling domains derived from at least one costimulatory molecule as defined below. In one aspect, the costimulatory molecule is chosen from the costimulatory molecules described herein, e.g., 4-1BB (i.e., CD137), CD27 and/or CD28. In one aspect, the CAR comprises a chimeric fusion protein comprising an extracellular antigen binding domain, a transmembrane domain and an intracellular signaling domain comprising a functional signaling domain derived from a stimulatory molecule. In one aspect, the CAR comprises a chimeric fusion protein comprising an extracellular antigen binding domain, a transmembrane domain and an intracellular signaling domain comprising a functional signaling domain derived from a costimulatory molecule and a functional signaling domain derived from a stimulatory molecule. In one aspect, the CAR comprises a chimeric fusion protein comprising an extracellular antigen binding domain, a transmembrane domain and an intracellular signaling domain comprising two functional signaling domains derived from one or more costimulatory molecule(s) and a functional signaling domain derived from a stimulatory molecule. In one aspect, the CAR comprises a chimeric fusion protein comprising an extracellular antigen binding domain, a transmembrane domain and an intracellular signaling domain comprising at least two functional signaling domains derived from one or more costimulatory molecule(s) and a functional signaling domain derived from a stimulatory molecule. In one aspect the CAR comprises an optional leader sequence at the amino-terminus (N-ter) of the CAR fusion protein. In one aspect, the CAR further comprises a leader sequence at the N-terminus of the extracellular antigen binding domain, wherein the leader sequence is optionally cleaved from the antigen binding domain (e.g., a scFv) during cellular processing and localization of the CAR to the cellular membrane.

[0291] A CAR that comprises an antigen binding domain (e.g., a scFv, or TCR) that targets a specific tumor marker X, such as those described herein, is also referred to as XCAR. For example, a CAR that comprises an antigen binding domain that targets CD19 is referred to as CD19CAR.

[0292] The term “signaling domain” refers to the functional portion of a protein which acts by transmitting information within the cell to regulate cellular activity via defined signaling pathways by generating second messengers or functioning as effectors by responding to such messengers.

[0293] The term “antibody,” as used herein, refers to a protein, or polypeptide sequence derived from an immunoglobulin molecule which specifically binds with an antigen. Antibodies can be polyclonal or monoclonal, multiple or single chain, or intact immunoglobulins, and may be derived from natural sources or from recombinant sources. Antibodies can be tetramers of immunoglobulin molecules.

[0294] The term “antibody fragment” refers to at least one portion of an antibody, that retains the ability to specifically interact with (e.g., by binding, steric hinderance, stabilizing/destabilizing, spatial distribution) an epitope of an antigen. Examples of antibody fragments include, but are not limited to, Fab, Fab′, F(ab′)₂, Fv fragments, scFv antibody fragments, disulfide-linked Fvs (sdFv), a Fd fragment consisting of the VH and CH1 domains, linear antibodies, single domain antibodies such as sdAb (either VL or VH), camelid VHH domains, multi-specific antibodies formed from antibody fragments such as a bivalent fragment comprising two Fab fragments linked by a disulfide bridge at the hinge region, and an isolated CDR or other epitope binding fragments of an antibody. An antigen binding fragment can also be incorporated into single domain antibodies, maxibodies, minibodies, nanobodies, intrabodies, diabodies, triabodies, tetrabodies, v-NAR and bis-scFv (see, e.g., Hollinger and Hudson, Nature Biotechnology 23:1126-1136, 2005). Antigen binding fragments can also be grafted into scaffolds based on polypeptides such as a fibronectin type III (Fn3) (see U.S. Pat. No. 6,703,199, which describes fibronectin polypeptide minibodies).

[0295] The term “scFv” refers to a fusion protein comprising at least one antibody fragment comprising a variable region of a light chain and at least one antibody fragment comprising a variable region of a heavy chain, wherein the light and heavy chain variable regions are contiguously linked, e.g., via a synthetic linker, e.g., a short flexible polypeptide linker, and capable of being expressed as a single chain polypeptide, and wherein the scFv retains the specificity of the intact antibody from which it is derived. Unless specified, as used herein an scFv may have the VL and VH variable regions in either order, e.g., with respect to the N-terminal and C-terminal ends of the polypeptide, the scFv may comprise VL-linker-VH or may comprise VH-linker-VL.

[0296] The portion of the CAR of the invention comprising an antibody or antibody fragment thereof may exist in a variety of forms where the antigen binding domain is expressed as part of a contiguous polypeptide chain including, for example, a single domain antibody fragment (sdAb), a single chain antibody (scFv), a humanized antibody or bispecific antibody (Harlow et al., 1999, In: Using Antibodies: A Laboratory Manual, Cold Spring Harbor Laboratory Press, NY; Harlow et al., 1989, In: Antibodies: A Laboratory Manual, Cold Spring Harbor, N.Y.; Houston et al., 1988, Proc. Natl. Acad. Sci. USA 85:5879-5883; Bird et al., 1988, Science 242:423-426). In one aspect, the antigen binding domain of a CAR composition of the invention comprises an antibody fragment. In a further aspect, the CAR comprises an antibody fragment that comprises a scFv. The precise amino acid sequence boundaries of a given CDR can be determined using any of a number of well-known schemes, including those described by Kabat et al. (1991), “Sequences of Proteins of Immunological Interest,” 5th Ed. Public Health Service, National Institutes of Health, Bethesda, Md. (“Kabat” numbering scheme), Al-Lazikani et al., (1997) JMB 273,927-948 (“Chothia” numbering scheme), or a combination thereof.

[0297] As used herein, the term “binding domain” or “antibody molecule” refers to a protein, e.g., an immunoglobulin chain or fragment thereof, comprising at least one immunoglobulin variable domain sequence. The term “binding domain” or “antibody molecule” encompasses antibodies and antibody fragments. In an embodiment, an antibody molecule is a multispecific antibody molecule, e.g., it comprises a plurality of immunoglobulin variable domain sequences, wherein a first immunoglobulin variable domain sequence of the plurality has binding specificity for a first epitope and a second immunoglobulin variable domain sequence of the plurality has binding specificity for a second epitope. In an embodiment, a multispecific antibody molecule is a bispecific antibody molecule. A bispecific antibody has specificity for no more than two antigens. A bispecific antibody molecule is characterized by a first immunoglobulin variable domain sequence which has binding specificity for a first epitope and a second immunoglobulin variable domain sequence that has binding specificity for a second epitope.

[0298] The term “antibody heavy chain,” refers to the larger of the two types of polypeptide chains present in antibody molecules in their naturally occurring conformations, and which normally determines the class to which the antibody belongs.

[0299] The term “antibody light chain,” refers to the smaller of the two types of polypeptide chains present in antibody molecules in their naturally occurring conformations. Kappa (K) and lambda (λ) light chains refer to the two major antibody light chain isotypes.

[0300] The term “recombinant antibody” refers to an antibody which is generated using recombinant DNA technology, such as, for example, an antibody expressed by a bacteriophage or yeast expression system. The term should also be construed to mean an antibody which has been generated by the synthesis of a DNA molecule encoding the antibody and which DNA molecule expresses an antibody protein, or an amino acid sequence specifying the antibody, wherein the DNA or amino acid sequence has been obtained using recombinant DNA or amino acid sequence technology which is available and well known in the art.

[0301] The term “antigen” or “Ag” refers to a molecule that provokes an immune response. This immune response may involve either antibody production, or the activation of specific immunologically-competent cells, or both. The skilled artisan will understand that any macromolecule, including virtually all proteins or peptides, can serve as an antigen. Furthermore, antigens can be derived from recombinant or genomic DNA. A skilled artisan will understand that any DNA, which comprises a nucleotide sequences or a partial nucleotide sequence encoding a protein that elicits an immune response, therefore encodes an “antigen” as that term is used herein. Furthermore, one skilled in the art will understand that an antigen need not be encoded solely by a full length nucleotide sequence of a gene. It is readily apparent that the present invention includes, but is not limited to, the use of partial nucleotide sequences of more than one gene and that these nucleotide sequences are arranged in various combinations to encode polypeptides that elicit the desired immune response. Moreover, a skilled artisan will understand that an antigen need not be encoded by a “gene” at all. It is readily apparent that an antigen can be synthesized or can be derived from a biological sample, or might be a macromolecule besides a polypeptide. Such a biological sample can include, but is not limited to a tissue sample, a tumor sample, a cell or a fluid with other biological components.

[0302] The term “anti-cancer effect” refers to a biological effect which can be manifested by various means, including but not limited to, e.g., a decrease in tumor volume, a decrease in the number of cancer cells, a decrease in the number of metastases, an increase in life expectancy, decrease in cancer cell proliferation, decrease in cancer cell survival, or amelioration of various physiological symptoms associated with the cancerous condition. An “anti-cancer effect” can also be manifested by the ability of the peptides, polynucleotides, cells and antibodies in prevention of the occurrence of cancer in the first place. The term “anti-tumor effect” refers to a biological effect which can be manifested by various means, including but not limited to, e.g., a decrease in tumor volume, a decrease in the number of tumor cells, a decrease in tumor cell proliferation, an increase in tumor cell death, an increase in tumor cell apoptosis, or a decrease in tumor cell survival.

[0303] The term “autologous” refers to any material derived from the same individual to whom it is later to be re-introduced into the individual.

[0304] The term “allogeneic” refers to any material derived from a different animal of the same species as the individual to whom the material is introduced. Two or more individuals are said to be allogeneic to one another when the genes at one or more loci are not identical. In some aspects, allogeneic material from individuals of the same species may be sufficiently unlike genetically to interact antigenically.

[0305] The term “xenogeneic” refers to a graft derived from an animal of a different species.

[0306] The term “cancer” refers to a disease characterized by the uncontrolled growth of aberrant cells. Cancer cells can spread locally or through the bloodstream and lymphatic system to other parts of the body. Examples of various cancers are described herein and include but are not limited to, breast cancer, prostate cancer, ovarian cancer, cervical cancer, skin cancer, pancreatic cancer, colorectal cancer, renal cancer, liver cancer, brain cancer, lymphoma, leukemia, lung cancer and the like. The terms “tumor” and “cancer” are used interchangeably herein, e.g., both terms encompass solid and liquid, e.g., diffuse or circulating, tumors. As used herein, the term “cancer” or “tumor” includes premalignant, as well as malignant cancers and tumors.

[0307] “Derived from” as that term is used herein, indicates a relationship between a first and a second molecule. It generally refers to structural similarity between the first molecule and a second molecule and does not connotate or include a process or source limitation on a first molecule that is derived from a second molecule. For example, in the case of an intracellular signaling domain that is derived from a CD3zeta molecule, the intracellular signaling domain retains sufficient CD3zeta structure such that it has the required function, namely, the ability to generate a signal under the appropriate conditions. It does not connotate or include a limitation to a particular process of producing the intracellular signaling domain, e.g., it does not mean that, to provide the intracellular signaling domain, one must start with a CD3zeta sequence and delete unwanted sequence, or impose mutations, to arrive at the intracellular signaling domain.

[0308] The phrase “disease associated with expression of a tumor antigen as described herein” includes, but is not limited to, a disease associated with expression of a tumor antigen as described herein or condition associated with cells which express a tumor antigen as described herein including, e.g., proliferative diseases such as a cancer or malignancy or a precancerous condition such as a myelodysplasia, a myelodysplastic syndrome or a preleukemia; or a noncancer related indication associated with cells which express a tumor antigen as described herein. In one aspect, a cancer associated with expression of a tumor antigen as described herein is a hematological cancer. In one aspect, a cancer associated with expression of a tumor antigen as described herein is a solid cancer. Further diseases associated with expression of a tumor antigen described herein include, but not limited to, e.g., atypical and/or non-classical cancers, malignancies, precancerous conditions or proliferative diseases associated with expression of a tumor antigen as described herein. Non-cancer related indications associated with expression of a tumor antigen as described herein include, but are not limited to, e.g., autoimmune disease, (e.g., lupus), inflammatory disorders (allergy and asthma) and transplantation. In some embodiments, the tumor antigen-expressing cells express, or at any time expressed, mRNA encoding the tumor antigen. In an embodiment, the tumor antigen-expressing cells produce the tumor antigen protein (e.g., wild-type or mutant), and the tumor antigen protein may be present at normal levels or reduced levels. In an embodiment, the tumor antigen-expressing cells produced detectable levels of a tumor antigen protein at one point, and subsequently produced substantially no detectable tumor antigen protein.

[0309] The term “conservative sequence modifications” refers to amino acid modifications that do not significantly affect or alter the binding characteristics of the antibody or antibody fragment containing the amino acid sequence. Such conservative modifications include amino acid substitutions, additions and deletions. Modifications can be introduced into an antibody or antibody fragment of the invention by standard techniques known in the art, such as site-directed mutagenesis and PCR-mediated mutagenesis. Conservative amino acid substitutions are ones in which the amino acid residue is replaced with an amino acid residue having a similar side chain. Families of amino acid residues having similar side chains have been defined in the art. These families include amino acids with basic side chains (e.g., lysine, arginine, histidine), acidic side chains (e.g., aspartic acid, glutamic acid), uncharged polar side chains (e.g., glycine, asparagine, glutamine, serine, threonine, tyrosine, cysteine, tryptophan), nonpolar side chains (e.g., alanine, valine, leucine, isoleucine, proline, phenylalanine, methionine), beta-branched side chains (e.g., threonine, valine, isoleucine) and aromatic side chains (e.g., tyrosine, phenylalanine, tryptophan, histidine). Thus, one or more amino acid residues within a CAR of the invention can be replaced with other amino acid residues from the same side chain family and the altered CAR can be tested using the functional assays described herein.

[0310] The term “stimulation,” refers to a primary response induced by binding of a stimulatory molecule (e.g., a TCR/CD3 complex or CAR) with its cognate ligand (or tumor antigen in the case of a CAR) thereby mediating a signal transduction event, such as, but not limited to, signal transduction via the TCR/CD3 complex or signal transduction via the appropriate NK receptor or signaling domains of the CAR. Stimulation can mediate altered expression of certain molecules.

[0311] The term “stimulatory molecule,” refers to a molecule expressed by an immune cell (e.g., T cell, NK cell, B cell) that provides the cytoplasmic signaling sequence(s) that regulate activation of the immune cell in a stimulatory way for at least some aspect of the immune cell signaling pathway. In one aspect, the-signal is a primary signal that is initiated by, for instance, binding of a TCR/CD3 complex with an MHC molecule loaded with peptide, and which leads to mediation of a T cell response, including, but not limited to, proliferation, activation, differentiation, and the like. A primary cytoplasmic signaling sequence (also referred to as a “primary signaling domain”) that acts in a stimulatory manner may contain a signaling motif which is known as immunoreceptor tyrosine-based activation motif or ITAM. Examples of an ITAM containing-cytoplasmic signaling sequence that is of particular use in the invention include, but are not limited to, those derived from CD3 zeta, common FcR gamma (FCER1G), Fc gamma Rlla, FcR beta (Fc Epsilon R1b), CD3 gamma, CD3 delta, CD3 epsilon, CD79a, CD79b, DAP10, and DAP12. In a specific CAR of the invention, the intracellular signaling domain in any one or more CARS of the invention comprises an intracellular signaling sequence, e.g., a primary signaling sequence of CD3-zeta. In a specific CAR of the invention, the primary signaling sequence of CD3-zeta is the sequence provided as SEQ ID NO: 18, or the equivalent residues from a non-human species, e.g., mouse, rodent, monkey, ape and the like. In a specific CAR of the invention, the primary signaling sequence of CD3-zeta is the sequence as provided in SEQ ID NO:20, or the equivalent residues from a non-human species, e.g., mouse, rodent, monkey, ape and the like.

[0312] The term “antigen presenting cell” or “APC” refers to an immune system cell such as an accessory cell (e.g., a B-cell, a dendritic cell, and the like) that displays a foreign antigen complexed with major histocompatibility complexes (MHC's) on its surface. T-cells may recognize these complexes using their T-cell receptors (TCRs). APCs process antigens and present them to T-cells.

[0313] An “intracellular signaling domain,” as the term is used herein, refers to an intracellular portion of a molecule. The intracellular signaling domain generates a signal that promotes an immune effector function of the CAR containing cell, e.g., a CART cell. Examples of immune effector function, e.g., in a CART cell, include cytolytic activity and helper activity, including the secretion of cytokines.

[0314] In an embodiment, the intracellular signaling domain can comprise a primary intracellular signaling domain. Exemplary primary intracellular signaling domains include those derived from the molecules responsible for primary stimulation, or antigen dependent simulation. In an embodiment, the intracellular signaling domain can comprise a costimulatory intracellular domain. Exemplary costimulatory intracellular signaling domains include those derived from molecules responsible for costimulatory signals, or antigen independent stimulation. For example, in the case of a CART, a primary intracellular signaling domain can comprise a cytoplasmic sequence of a T cell receptor, and a costimulatory intracellular signaling domain can comprise cytoplasmic sequence from co-receptor or costimulatory molecule.

[0315] A primary intracellular signaling domain can comprise a signaling motif which is known as an immunoreceptor tyrosine-based activation motif or ITAM. Examples of ITAM containing primary cytoplasmic signaling sequences include, but are not limited to, those derived from CD3 zeta, common FcR gamma (FCER1G), Fc gamma Rlla, FcR beta (Fc Epsilon R1b), CD3 gamma, CD3 delta, CD3 epsilon, CD79a, CD79b, DAP10, and DAP12.

[0316] The term “zeta” or alternatively “zeta chain”, “CD3-zeta” (or “CD3zeta, CD3 zeta or CD3z) or “TCR-zeta” is defined as the protein provided as GenBan Acc. No. BAG36664.1, or the equivalent residues from a non-human species, e.g., mouse, rodent, monkey, ape and the like, and a “zeta stimulatory domain” or alternatively a “CD3-zeta stimulatory domain” or a “TCR-zeta stimulatory domain” is defined as the amino acid residues from the cytoplasmic domain of the zeta chain, or functional derivatives thereof, that are sufficient to functionally transmit an initial signal necessary for T cell activation. In one aspect the cytoplasmic domain of zeta comprises residues 52 through 164 of GenBank Acc. No. BAG36664.1 or the equivalent residues from a non-human species, e.g., mouse, rodent, monkey, ape and the like, that are functional orthologs thereof. In one aspect, the “zeta stimulatory domain” or a “CD3-zeta stimulatory domain” is the sequence provided as SEQ ID NO:18. In one aspect, the “zeta stimulatory domain” or a “CD3-zeta stimulatory domain” is the sequence provided as SEQ ID NO:20.

[0317] The term a “costimulatory molecule” refers to a cognate binding partner on a T cell that specifically binds with a costimulatory ligand, thereby mediating a costimulatory response by the T cell, such as, but not limited to, proliferation. Costimulatory molecules are cell surface molecules other than antigen receptors or their ligands that are contribute to an efficient immune response. Costimulatory molecules include, but are not limited to an MHC class I molecule, BTLA and a Toll ligand receptor, as well as OX40, CD27, CD28, CDS, ICAM-1, LFA-1 (CD11a/CD18), ICOS (CD278), and 4-1BB (CD137). Further examples of such costimulatory molecules include CDS, ICAM-1, GITR, BAFFR, HVEM (LIGHTR), SLAMF7, NKp80 (KLRF1), NKp44, NKp30, NKp46, CD160, CD19, CD4, CD8alpha, CD8beta, IL2R beta, IL2R gamma, IL7R alpha, ITGA4, VLA1, CD49a, ITGA4, IA4, CD49D, ITGA6, VLA-6, CD49f, ITGAD, CD11d, ITGAE, CD103, ITGAL, CD11a, LFA-1, ITGAM, CD11b, ITGAX, CD11c, ITGB1, CD29, ITGB2, CD18, LFA-1, ITGB7, NKG2D, NKG2C, TNFR2, TRANCE/RANKL, DNAM1 (CD226), SLAMF4 (CD244, 2B4), CD84, CD96 (Tactile), CEACAM1, CRTAM, Ly9 (CD229), CD160 (BY55), PSGL1, CD100 (SEMA4D), CD69, SLAMF6 (NTB-A, Ly108), SLAM (SLAMF1, CD150, IPO-3), BLAME (SLAMF8), SELPLG (CD162), LTBR, LAT, GADS, SLP-76, PAG/Cbp, CD19a, and a ligand that specifically binds with CD83.

[0318] A costimulatory intracellular signaling domain can be the intracellular portion of a costimulatory molecule. A costimulatory molecule can be represented in the following protein families: TNF receptor proteins, Immunoglobulin-like proteins, cytokine receptors, integrins, signaling lymphocytic activation molecules (SLAM proteins), and activating NK cell receptors. Examples of such molecules include CD27, CD28, 4-1BB (CD137), OX40, GITR, CD30, CD40, ICOS, BAFFR, HVEM, ICAM-1, lymphocyte function-associated antigen-1 (LFA-1), CD2, CDS, CD7, CD287, LIGHT, NKG2C, NKG2D, SLAMF7, NKp80, NKp30, NKp44, NKp46, CD160, B7-H3, and a ligand that specifically binds with CD83, and the like.

[0319] The intracellular signaling domain can comprise the entire intracellular portion, or the entire native intracellular signaling domain, of the molecule from which it is derived, or a functional fragment or derivative thereof.

[0320] The term “4-1BB” refers to a member of the TNFR superfamily with an amino acid sequence provided as GenBank Acc. No. AAA62478.2, or the equivalent residues from a non-human species, e.g., mouse, rodent, monkey, ape and the like; and a “4-1BB costimulatory domain” is defined as amino acid residues 214-255 of GenBank Acc. No. AAA62478.2, or the equivalent residues from a non-human species, e.g., mouse, rodent, monkey, ape and the like. In one aspect, the “4-1BB costimulatory domain” is the sequence provided as SEQ ID NO:14 or the equivalent residues from a non-human species, e.g., mouse, rodent, monkey, ape and the like.

[0321] “Immune effector cell,” as that term is used herein, refers to a cell that is involved in an immune response, e.g., in the promotion of an immune effector response. Examples of immune effector cells include T cells, e.g., alpha/beta T cells and gamma/delta T cells, B cells, natural killer (NK) cells, natural killer T (NKT) cells, mast cells, and myeloic-derived phagocytes.

[0322] “Immune effector function or immune effector response,” as that term is used herein, refers to function or response, e.g., of an immune effector cell, that enhances or promotes an immune attack of a target cell. E.g., an immune effector function or response refers a property of a T or NK cell that promotes killing or inhibition of growth or proliferation, of a target cell. In the case of a T cell, primary stimulation and co-stimulation are examples of immune effector function or response.

[0323] The term “encoding” refers to the inherent property of specific sequences of nucleotides in a polynucleotide, such as a gene, a cDNA, or an mRNA, to serve as templates for synthesis of other polymers and macromolecules in biological processes having either a defined sequence of nucleotides (e.g., rRNA, tRNA and mRNA) or a defined sequence of amino acids and the biological properties resulting therefrom. Thus, a gene, cDNA, or RNA, encodes a protein if transcription and translation of mRNA corresponding to that gene produces the protein in a cell or other biological system. Both the coding strand, the nucleotide sequence of which is identical to the mRNA sequence and is usually provided in sequence listings, and the non-coding strand, used as the template for transcription of a gene or cDNA, can be referred to as encoding the protein or other product of that gene or cDNA.

[0324] Unless otherwise specified, a “nucleotide sequence encoding an amino acid sequence” includes all nucleotide sequences that are degenerate versions of each other and that encode the same amino acid sequence. The phrase nucleotide sequence that encodes a protein or a RNA may also include introns to the extent that the nucleotide sequence encoding the protein may in some version contain an intron(s).

[0325] The term “effective amount” or “therapeutically effective amount” are used interchangeably herein, and refer to an amount of a compound, formulation, material, or composition, as described herein effective to achieve a particular biological result.

[0326] The term “endogenous” refers to any material from or produced inside an organism, cell, tissue or system.

[0327] The term “exogenous” refers to any material introduced from or produced outside an organism, cell, tissue or system.

[0328] The term “expression” refers to the transcription and/or translation of a particular nucleotide sequence driven by a promoter.

[0329] The term “transfer vector” refers to a composition of matter which comprises an isolated nucleic acid and which can be used to deliver the isolated nucleic acid to the interior of a cell. Numerous vectors are known in the art including, but not limited to, linear polynucleotides, polynucleotides associated with ionic or amphiphilic compounds, plasmids, and viruses. Thus, the term “transfer vector” includes an autonomously replicating plasmid or a virus. The term should also be construed to further include non-plasmid and non-viral compounds which facilitate transfer of nucleic acid into cells, such as, for example, a polylysine compound, liposome, and the like. Examples of viral transfer vectors include, but are not limited to, adenoviral vectors, adeno-associated virus vectors, retroviral vectors, lentiviral vectors, and the like.

[0330] The term “expression vector” refers to a vector comprising a recombinant polynucleotide comprising expression control sequences operatively linked to a nucleotide sequence to be expressed. An expression vector comprises sufficient cis-acting elements for expression; other elements for expression can be supplied by the host cell or in an in vitro expression system. Expression vectors include all those known in the art, including cosmids, plasmids (e.g., naked or contained in liposomes) and viruses (e.g., lentiviruses, retroviruses, adenoviruses, and adeno-associated viruses) that incorporate the recombinant polynucleotide.

[0331] The term “lentivirus” refers to a genus of the Retroviridae family. Lentiviruses are unique among the retroviruses in being able to infect non-dividing cells; they can deliver a significant amount of genetic information into the DNA of the host cell, so they are one of the most efficient methods of a gene delivery vector. HIV, SIV, and FIV are all examples of lentiviruses.

[0332] The term “lentiviral vector” refers to a vector derived from at least a portion of a lentivirus genome, including especially a self-inactivating lentiviral vector as provided in Milone et al., Mol. Ther. 17(8): 1453-1464 (2009). Other examples of lentivirus vectors that may be used in the clinic, include but are not limited to, e.g., the LENTIVECTOR® gene delivery technology from Oxford BioMedica, the LENTIMAX™ vector system from Lentigen and the like. Nonclinical types of lentiviral vectors are also available and would be known to one skilled in the art.

[0333] The term “homologous” or “identity” refers to the subunit sequence identity between two polymeric molecules, e.g., between two nucleic acid molecules, such as, two DNA molecules or two RNA molecules, or between two polypeptide molecules. When a subunit position in both of the two molecules is occupied by the same monomeric subunit; e.g., if a position in each of two DNA molecules is occupied by adenine, then they are homologous or identical at that position. The homology between two sequences is a direct function of the number of matching or homologous positions; e.g., if half (e.g., five positions in a polymer ten subunits in length) of the positions in two sequences are homologous, the two sequences are 50% homologous; if 90% of the positions (e.g., 9 of 10), are matched or homologous, the two sequences are 90% homologous.

[0334] “Humanized” forms of non-human (e.g., murine) antibodies are chimeric immunoglobulins, immunoglobulin chains or fragments thereof (such as Fv, Fab, Fab′, F(ab′)2 or other antigen-binding subsequences of antibodies) which contain minimal sequence derived from non-human immunoglobulin. For the most part, humanized antibodies and antibody fragments thereof are human immunoglobulins (recipient antibody or antibody fragment) in which residues from a complementary-determining region (CDR) of the recipient are replaced by residues from a CDR of a non-human species (donor antibody) such as mouse, rat or rabbit having the desired specificity, affinity, and capacity. In some instances, Fv framework region (FR) residues of the human immunoglobulin are replaced by corresponding non-human residues. Furthermore, a humanized antibody/antibody fragment can comprise residues which are found neither in the recipient antibody nor in the imported CDR or framework sequences. These modifications can further refine and optimize antibody or antibody fragment performance. In general, the humanized antibody or antibody fragment thereof will comprise substantially all of at least one, and typically two, variable domains, in which all or substantially all of the CDR regions correspond to those of a non-human immunoglobulin and all or a significant portion of the FR regions are those of a human immunoglobulin sequence. The humanized antibody or antibody fragment can also comprise at least a portion of an immunoglobulin constant region (Fc), typically that of a human immunoglobulin. For further details, see Jones et al., Nature, 321: 522-525, 1986; Reichmann et al., Nature, 332: 323-329, 1988; Presta, Curr. Op. Struct. Biol., 2: 593-596, 1992.

[0335] “Fully human” refers to an immunoglobulin, such as an antibody or antibody fragment, where the whole molecule is of human origin or consists of an amino acid sequence identical to a human form of the antibody or immunoglobulin.

[0336] The term “isolated” means altered or removed from the natural state. For example, a nucleic acid or a peptide naturally present in a living animal is not “isolated,” but the same nucleic acid or peptide partially or completely separated from the coexisting materials of its natural state is “isolated.” An isolated nucleic acid or protein can exist in substantially purified form, or can exist in a non-native environment such as, for example, a host cell.

[0337] The term “operably linked” or “transcriptional control” refers to functional linkage between a regulatory sequence and a heterologous nucleic acid sequence resulting in expression of the latter. For example, a first nucleic acid sequence is operably linked with a second nucleic acid sequence when the first nucleic acid sequence is placed in a functional relationship with the second nucleic acid sequence. For instance, a promoter is operably linked to a coding sequence if the promoter affects the transcription or expression of the coding sequence. Operably linked DNA sequences can be contiguous with each other and, e.g., where necessary to join two protein coding regions, are in the same reading frame.

[0338] The term “parenteral” administration of an immunogenic composition includes, e.g., subcutaneous (s.c.), intravenous (i.v.), intramuscular (i.m.), or intrasternal injection, intratumoral, or infusion techniques.

[0339] The term “nucleic acid” or “polynucleotide” refers to deoxyribonucleic acids (DNA) or ribonucleic acids (RNA) and polymers thereof in either single- or double-stranded form. Unless specifically limited, the term encompasses nucleic acids containing known analogues of natural nucleotides that have similar binding properties as the reference nucleic acid and are metabolized in a manner similar to naturally occurring nucleotides. Unless otherwise indicated, a particular nucleic acid sequence also implicitly encompasses conservatively modified variants thereof (e.g., degenerate codon substitutions), alleles, orthologs, SNPs, and complementary sequences as well as the sequence explicitly indicated. Specifically, degenerate codon substitutions may be achieved by generating sequences in which the third position of one or more selected (or all) codons is substituted with mixed-base and/or deoxyinosine residues (Batzer et al., Nucleic Acid Res. 19:5081 (1991); Ohtsuka et al., J. Biol. Chem. 260:2605-2608 (1985); and Rossolini et al., Mol. Cell. Probes 8:91-98 (1994)).

[0340] The terms “peptide,” “polypeptide,” and “protein” are used interchangeably, and refer to a compound comprised of amino acid residues covalently linked by peptide bonds. A protein or peptide must contain at least two amino acids, and no limitation is placed on the maximum number of amino acids that can comprise a protein's or peptide's sequence. Polypeptides include any peptide or protein comprising two or more amino acids joined to each other by peptide bonds. As used herein, the term refers to both short chains, which also commonly are referred to in the art as peptides, oligopeptides and oligomers, for example, and to longer chains, which generally are referred to in the art as proteins, of which there are many types. “Polypeptides” include, for example, biologically active fragments, substantially homologous polypeptides, oligopeptides, homodimers, heterodimers, variants of polypeptides, modified polypeptides, derivatives, analogs, fusion proteins, among others. A polypeptide includes a natural peptide, a recombinant peptide, or a combination thereof.

[0341] The term “promoter” refers to a DNA sequence recognized by the synthetic machinery of the cell, or introduced synthetic machinery, required to initiate the specific transcription of a polynucleotide sequence.

[0342] The term “promoter/regulatory sequence” refers to a nucleic acid sequence which is required for expression of a gene product operably linked to the promoter/regulatory sequence. In some instances, this sequence may be the core promoter sequence and in other instances, this sequence may also include an enhancer sequence and other regulatory elements which are required for expression of the gene product. The promoter/regulatory sequence may, for example, be one which expresses the gene product in a tissue specific manner.

[0343] The term “constitutive” promoter refers to a nucleotide sequence which, when operably linked with a polynucleotide which encodes or specifies a gene product, causes the gene product to be produced in a cell under most or all physiological conditions of the cell.

[0344] The term “inducible” promoter refers to a nucleotide sequence which, when operably linked with a polynucleotide which encodes or specifies a gene product, causes the gene product to be produced in a cell substantially only when an inducer which corresponds to the promoter is present in the cell.

[0345] The term “tissue-specific” promoter refers to a nucleotide sequence which, when operably linked with a polynucleotide encodes or specified by a gene, causes the gene product to be produced in a cell substantially only if the cell is a cell of the tissue type corresponding to the promoter.

[0346] The terms “cancer associated antigen” or “tumor antigen” interchangeably refers to a molecule (typically a protein, carbohydrate or lipid) that is expressed on the surface of a cancer cell, either entirely or as a fragment (e.g., MHC/peptide), and which is useful for the preferential targeting of a pharmacological agent to the cancer cell. In some embodiments, a tumor antigen is a marker expressed by both normal cells and cancer cells, e.g., a lineage marker, e.g., CD19 on B cells. In some embodiments, a tumor antigen is a cell surface molecule that is overexpressed in a cancer cell in comparison to a normal cell, for instance, 1-fold over expression, 2-fold overexpression, 3-fold overexpression or more in comparison to a normal cell. In some embodiments, a tumor antigen is a cell surface molecule that is inappropriately synthesized in the cancer cell, for instance, a molecule that contains deletions, additions or mutations in comparison to the molecule expressed on a normal cell. In some embodiments, a tumor antigen will be expressed exclusively on the cell surface of a cancer cell, entirely or as a fragment (e.g., MHC/peptide), and not synthesized or expressed on the surface of a normal cell. In some embodiments, the CARs of the present invention includes CARs comprising an antigen binding domain (e.g., antibody or antibody fragment) that binds to a MHC presented peptide. Normally, peptides derived from endogenous proteins fill the pockets of Major histocompatibility complex (MHC) class I molecules, and are recognized by T cell receptors (TCRs) on CD8+ T lymphocytes. The MHC class I complexes are constitutively expressed by all nucleated cells. In cancer, virus-specific and/or tumor-specific peptide/MHC complexes represent a unique class of cell surface targets for immunotherapy. TCR-like antibodies targeting peptides derived from viral or tumor antigens in the context of human leukocyte antigen (HLA)-A1 or HLA-A2 have been described (see, e.g., Sastry et al., J Virol. 2011 85(5):1935-1942; Sergeeva et al., Blood, 2011 117(16):4262-4272; Verma et al., J Immunol 2010 184(4):2156-2165; Willemsen et al., Gene Ther 2001 8(21):1601-1608; Dao et al., Sci Transl Med 2013 5(176):176ra33; Tassev et al., Cancer Gene Ther 2012 19(2):84-100). For example, TCR-like antibody can be identified from screening a library, such as a human scFv phage displayed library.

[0347] The term “tumor-supporting antigen” or “cancer-supporting antigen” interchangeably refer to a molecule (typically a protein, carbohydrate or lipid) that is expressed on the surface of a cell that is, itself, not cancerous, but supports the cancer cells, e.g., by promoting their growth or survival e.g., resistance to immune cells. Exemplary cells of this type include stromal cells and myeloid-derived suppressor cells (MDSCs). The tumor-supporting antigen itself need not play a role in supporting the tumor cells so long as the antigen is present on a cell that supports cancer cells.

[0348] The term “flexible polypeptide linker” or “linker” as used in the context of a scFv refers to a peptide linker that consists of amino acids such as glycine and/or serine residues used alone or in combination, to link variable heavy and variable light chain regions together. In one embodiment, the flexible polypeptide linker is a Gly/Ser linker and comprises the amino acid sequence (Gly-Gly-Gly-Ser)n, where n is a positive integer equal to or greater than 1. For example, n=1, n=2, n=3. n=4, n=5 and n=6, n=7, n=8, n=9 and n=10 (SEQ ID NO:28). In one embodiment, the flexible polypeptide linkers include, but are not limited to, (Gly4 Ser)4 (SEQ ID NO:29) or (Gly4 Ser)3 (SEQ ID NO:30). In another embodiment, the linkers include multiple repeats of (Gly2Ser), (GlySer) or (Gly3Ser) (SEQ ID NO:31). Also included within the scope of the invention are linkers described in WO2012/138475, incorporated herein by reference.

[0349] As used herein, a 5′ cap (also termed an RNA cap, an RNA 7-methylguanosine cap or an RNA m⁷G cap) is a modified guanine nucleotide that has been added to the “front” or 5′ end of a eukaryotic messenger RNA shortly after the start of transcription. The 5′ cap consists of a terminal group which is linked to the first transcribed nucleotide. Its presence is critical for recognition by the ribosome and protection from RNases. Cap addition is coupled to transcription, and occurs co-transcriptionally, such that each influences the other. Shortly after the start of transcription, the 5′ end of the mRNA being synthesized is bound by a cap-synthesizing complex associated with RNA polymerase. This enzymatic complex catalyzes the chemical reactions that are required for mRNA capping. Synthesis proceeds as a multi-step biochemical reaction. The capping moiety can be modified to modulate functionality of mRNA such as its stability or efficiency of translation.

[0350] As used herein, “in vitro transcribed RNA” refers to RNA, preferably mRNA, that has been synthesized in vitro. Generally, the in vitro transcribed RNA is generated from an in vitro transcription vector. The in vitro transcription vector comprises a template that is used to generate the in vitro transcribed RNA.

[0351] As used herein, a “poly(A)” is a series of adenosines attached by polyadenylation to the mRNA. In a preferred embodiment of a construct for transient expression, the polyA is between 50 and 5000 (SEQ ID NO: 34), preferably greater than 64, more preferably greater than 100, most preferably greater than 300 or 400 poly(A) sequences can be modified chemically or enzymatically to modulate mRNA functionality such as localization, stability or efficiency of translation.

[0352] As used herein, “polyadenylation” refers to the covalent linkage of a polyadenylyl moiety, or its modified variant, to a messenger RNA molecule. In eukaryotic organisms, most messenger RNA (mRNA) molecules are polyadenylated at the 3′ end. The 3′ poly(A) tail is a long sequence of adenine nucleotides (often several hundred) added to the pre-mRNA through the action of an enzyme, polyadenylate polymerase. In higher eukaryotes, the poly(A) tail is added onto transcripts that contain a specific sequence, the polyadenylation signal. The poly(A) tail and the protein bound to it aid in protecting mRNA from degradation by exonucleases. Polyadenylation is also important for transcription termination, export of the mRNA from the nucleus, and translation. Polyadenylation occurs in the nucleus immediately after transcription of DNA into RNA, but additionally can also occur later in the cytoplasm. After transcription has been terminated, the mRNA chain is cleaved through the action of an endonuclease complex associated with RNA polymerase. The cleavage site is usually characterized by the presence of the base sequence AAUAAA near the cleavage site. After the mRNA has been cleaved, adenosine residues are added to the free 3′ end at the cleavage site.

[0353] As used herein in connection with expression, e.g., expression of a CAR molecule, “transient” refers to expression of a non-integrated transgene for a period of hours, days or weeks, wherein the period of time of expression is less than the period of time for expression of the gene if integrated into the genome or contained within a stable plasmid replicon in the host cell.

[0354] As used herein in connection with an effect, e.g., an effect of an LSD1 inhibitor, “transient” means the effect is present for a period of, for example, hours, days, weeks or months, but diminishes (e.g., until the effect is no longer measurable) over a period of time. In embodiments the effect is as measured according to the assays described herein, e.g., in the examples.

[0355] As used herein, the terms “treat”, “treatment” and “treating” refer to the reduction or amelioration of the progression, severity and/or duration of a proliferative disorder, or the amelioration of one or more symptoms (preferably, one or more discernible symptoms) of a proliferative disorder resulting from the administration of one or more therapies (e.g., one or more therapeutic agents such as a CAR of the invention). In specific embodiments, the terms “treat”, “treatment” and “treating” refer to the amelioration of at least one measurable physical parameter of a proliferative disorder, such as growth of a tumor, not necessarily discernible by the patient. In other embodiments the terms “treat”, “treatment” and “treating”-refer to the inhibition of the progression of a proliferative disorder, either physically by, e.g., stabilization of a discernible symptom, physiologically by, e.g., stabilization of a physical parameter, or both. In other embodiments the terms “treat”, “treatment” and “treating” refer to the reduction or stabilization of tumor size or cancerous cell count.

[0356] The term “signal transduction pathway” refers to the biochemical relationship between a variety of signal transduction molecules that play a role in the transmission of a signal from one portion of a cell to another portion of a cell. The phrase “cell surface receptor” includes molecules and complexes of molecules capable of receiving a signal and transmitting signal across the membrane of a cell.

[0357] The term “subject” is intended to include living organisms in which an immune response can be elicited (e.g., mammals, human).

[0358] The term, a “substantially purified” cell refers to a cell that is essentially free of other cell types. A substantially purified cell also refers to a cell which has been separated from other cell types with which it is normally associated in its naturally occurring state. In some instances, a population of substantially purified cells refers to a homogenous population of cells. In other instances, this term refers simply to cell that have been separated from the cells with which they are naturally associated in their natural state. In some aspects, the cells are cultured in vitro. In other aspects, the cells are not cultured in vitro.

[0359] The term “therapeutic” as used herein means a treatment. A therapeutic effect is obtained by reduction, suppression, remission, or eradication of a disease state.

[0360] The term “prophylaxis” as used herein means the prevention of or protective treatment for a disease or disease state.

[0361] The term “transfected” or “transformed” or “transduced” refers to a process by which exogenous nucleic acid is transferred or introduced into the host cell. A “transfected” or “transformed” or “transduced” cell is one which has been transfected, transformed or transduced with exogenous nucleic acid. The cell includes the primary subject cell and its progeny.

[0362] The term “specifically binds,” refers to an antibody, or a ligand, which recognizes and binds with a binding partner (e.g., a tumor antigen) protein present in a sample, but which antibody or ligand does not substantially recognize or bind other molecules in the sample.

[0363] “Regulatable chimeric antigen receptor (RCAR),” as that term is used herein, refers to a set of polypeptides, typically two in the simplest embodiments, which when in a RCARX cell, provides the RCARX cell with specificity for a target cell, typically a cancer cell, and with regulatable intracellular signal generation or proliferation, which can optimize an immune effector property of the RCARX cell. An RCARX cell relies at least in part, on an antigen binding domain to provide specificity to a target cell that comprises the antigen bound by the antigen binding domain. In an embodiment, an RCAR includes a dimerization switch that, upon the presence of a dimerization molecule, can couple an intracellular signaling domain to the antigen binding domain.

[0364] “Membrane anchor” or “membrane tethering domain”, as that term is used herein, refers to a polypeptide or moiety, e.g., a myristoyl group, sufficient to anchor an extracellular or intracellular domain to the plasma membrane.

[0365] “Switch domain,” as that term is used herein, e.g., when referring to an RCAR, refers to an entity, typically a polypeptide-based entity, that, in the presence of a dimerization molecule, associates with another switch domain. The association results in a functional coupling of a first entity linked to, e.g., fused to, a first switch domain, and a second entity linked to, e.g., fused to, a second switch domain. A first and second switch domain are collectively referred to as a dimerization switch. In embodiments, the first and second switch domains are the same as one another, e.g., they are polypeptides having the same primary amino acid sequence, and are referred to collectively as a homodimerization switch. In embodiments, the first and second switch domains are different from one another, e.g., they are polypeptides having different primary amino acid sequences, and are referred to collectively as a heterodimerization switch. In embodiments, the switch is intracellular. In embodiments, the switch is extracellular. In embodiments, the switch domain is a polypeptide-based entity, e.g., FKBP or FRB-based, and the dimerization molecule is small molecule, e.g., a rapalogue. In embodiments, the switch domain is a polypeptide-based entity, e.g., an scFv that binds a myc peptide, and the dimerization molecule is a polypeptide, a fragment thereof, or a multimer of a polypeptide, e.g., a myc ligand or multimers of a myc ligand that bind to one or more myc scFvs. In embodiments, the switch domain is a polypeptide-based entity, e.g., myc receptor, and the dimerization molecule is an antibody or fragments thereof, e.g., myc antibody.

[0366] “Dimerization molecule,” as that term is used herein, e.g., when referring to an RCAR, refers to a molecule that promotes the association of a first switch domain with a second switch domain. In embodiments, the dimerization molecule does not naturally occur in the subject, or does not occur in concentrations that would result in significant dimerization. In embodiments, the dimerization molecule is a small molecule, e.g., rapamycin or a rapalogue, e.g, RAD001.

[0367] The term “bioequivalent” refers to an amount of an agent other than the reference compound, required to produce an effect equivalent to the effect produced by the reference dose or reference amount of the reference compound. In an embodiment the effect is the level of LSD1 inhibition, e.g., as measured by LSD1 protein levels, e.g., as evaluated in an in vivo or in vitro assay, e.g., as measured by an assay described herein, e.g., flow cytometry. In an embodiment, the effect is enhanced proliferation of T_{SCM} cells, e.g., CD45RA+CD62L+ cells, e.g., e.g., enhanced proliferation relative to other T cell phenotypes, e.g., T_{CM} (e.g., CD45RA−CD62L+), T_{EM} (e.g., CD45RA−CD62L−), T_{EFF} or T_{REG} cells, e.g., as measured by cell sorting. In an embodiment, the effect is enhanced proliferation of T_{SCM} cells, e.g., CD45RA+CCR7+ cells, e.g., e.g., enhanced proliferation relative to other T cell phenotypes, e.g., CD45RA-CCR7+, CD45RA-CCR7−, CD45RA+CCR7−, T_{EFF} or T_{REG} cells, e.g., as measured by cell sorting.

[0368] “Refractory” as used herein refers to a disease, e.g., cancer, that does not respond to a treatment. In embodiments, a refractory cancer can be resistant to a treatment before or at the beginning of the treatment. In other embodiments, the refractory cancer can become resistant during a treatment. A refractory cancer is also called a resistant cancer.

[0369] “Relapsed” as used herein refers to the return of a disease (e.g., cancer) or the signs and symptoms of a disease such as cancer after a period of improvement, e.g., after prior treatment of a therapy, e.g., cancer therapy

[0370] “LSD1,” “lysine-specific demethylase 1A,” “Lysine-specific histone demethylase 1A,” “KDM1A,” “AOF2,” “KIAA0601” and “BHC110” are used interchangeably herein, and refer to the gene KDM1A (lysine-specific demethylase 1A) and the protein encoded by said gene, lysine-specific demethylase 1A (LSD1). This gene encodes a nuclear protein containing a SWIRM domain, a FAD-binding motif, and an amine oxidase domain. This protein is a component of several histone deacetylase complexes, through it silences genes by functioning as a histone demethylase. In the human genome, KDM1A is located on chromosome 1 Chr1:23030596 (on Assembly GRCh38). Currently two isoforms of LSD1 are known, and the isoforms are described in GeneBank number NM_001009999.2 and NM_015013.3.

[0371] Examples of the protein sequence of human LSD1 is provided as UniProt accession number 060341-1 having an amino acid sequence as follows:

SEQ ID NO: 40

```
                10 20 30 40
MLSGKKAAAA AAAAAAAATG TEAGPGTAGG SENGSEVAAQ
                50 60 70 80
PAGLSGPAEV GPGAVGERTP RKKEPPRASP PGGLAEPPGS
                90 100 110 120
AGPQAGPTVV PGSATPMETG IAETPEGRRT SRRKRAKVEY
              130 140 150 160
REMDESLANL SEDEYYSEEE RNAKAEKEKK LPPPPPQAPP
              170 180 190 200
EEENESEPEE PSGVEGAAFQ SRLPHDRMTS QEAACFPDII
              210 220 230 240
SGPQQTQKVF LFIRNRTLQL WLDNPKIQLT FEATLQQLEA
              250 260 270 280
PYNSDTVLVH RVHSYLERHG LINFGIYKRI KPLPTKKTGK
              290 300 310 320
VIIIGSGVSG LAAARQLQSF GMDVTLLEAR DRVGGRVATF
              330 340 350 360
RKGNYVADLG AMVVTGLGGN PMAVVSKQVN MELAKIKQKC
              370 380 390 400
PLYEANGQAV PKEKDEMVEQ EFNRLLEATS YLSHQLDFNV
              410 420 430 440
LNNKPVSLGQ ALEVVIQLQE KHVKDEQIEH WKKIVKTQEE
              450 460 470 480
LKELLNKMVN LKEKIKELHQ QYKEASEVKP PRDITAEFLV
              490 500 510 520
KSKHRDLTAL CKEYDELAET QGKLEEKLQE LEANPPSDVY
              530 540 550 560
LSSRDRQILD WHFANLEFAN ATPLSTLSLK HWDQDDDFEF
              570 580 590 600
TGSHLTVRNG YSCVPVALAE GLDIKLNTAV RQVRYTASGC
              610 620 630 640
EVIAVNTRST SQTFIYKCDA VLCTLPLGVL KQQPPAVQFV
              650 660 670 680
PPLPEWKTSA VQRMGFGNLN KVVLCFDRVF WDPSVNLFGH
              690 700 710 720
VGSTTASRGE LELFWNLYKA PILLALVAGE AAGIMENISD
              730 740 750 760
DVIVGRCLAI LKGIFGSSAV PQPKETVVSR WRADPWARGS
              770 780 790 800
YSYVAAGSSG NDYDLMAQPI TPGPSIPGAP QPIPRLFFAG
              810 820 830 840
EHTIRNYPAT VHGALLSGLR EAGRIADQFL GAMYTLPRQA
              850 852
TPGVPAQQSP SM.
```

[0372] The invention also includes other isoforms of LSD1, including Isoform 2, provided as UniProt accession number 060341-2.

[0373] Examples of nucleic acid sequences encoding LSD1 are provided below. There are 2 identified isoforms of human LSD1. The mRNA sequences are provided below (In embodiments, in each sequence, T may be replaced with U). In embodiments, LSD1 includes the proteins encoded by each of the sequences below:

| Gene ID | Variant | Sequence |
|---|---|---|
| KDM1A/LSD1/AOF2; | Isoform A; NCBI Reference | GGCGCGGCGGGAGCGCGCTTGGCGCGTGCGTACGCG |
| Gene ID: 23028 | Sequence: NM_001009999.2 | ACGGCGGTTGGCGGCGCGCGGGCAGCGTGAAGCG |
| SEQ ID NO: 41 | | AGGCGAGGCAAGGCTTTTCGGACCCACGGAGCGACA |
| | | GAGCGAGCGGCCCCTACGGCCGTCGGCGGCCCGG |
| | | CGGCCCGAGATGTTATCTGGGAAGAAGGCGGCAGCC |
| | | GCGGCGGCGGCGGCTGCAGCGGCAGCAACCGGGA |
| | | CGGAGGCTGGCCCTGGGACAGCAGGCGGCTCCGAGA |
| | | ACGGGTCTGAGGTGGCCGCGCAGCCCGCGGGCCT |
| | | GTCGGGCCCAGCCGAGGTCGGGCCGGGGGCGGTGG |
| | | GGGAGCGCACACCCCGCAAGAAAGAGCCTCCGCGG |
| | | GCCTCGCCCCCCGGGGGCCTGGCGGAACCGCCGGGG |
| | | TCCGCAGGGCCTCAGGCCGGCCCTACTGTCGTGC |
| | | CTGGGTCTGCGACCCCCATGGAAACTGGAATAGCAGA |
| | | GACTCCGGAGGGGCGTCGGACCAGCCGGCGCAA |
| | | GCGGGCGAAGGTAGAGTACAGAGAGATGGATGAAA |
| | | GCTTGGCCAACCTCTCAGAAGATGAGTATTATTCA |
| | | GAAGAAGAGAGAAATGCCAAAGCAGAGAAGGAAAA |
| | | GAAGCTTCCCCCACCACCCCCTCAAGCCCCACCTG |
| | | AGGAAGAAAATGAAAGTGAGCCTGAAGAACCATCGG |
| | | GGCAAGCAGGAGGACTTCAAGACGACAGTTCTGG |
| | | AGGGTATGGAGACGGCCAAGCATCAGGTGTGGAGGG |
| | | CGCAGCTTTCCAGAGCCGACTTCCTCATGACCGG |
| | | ATGACTTCTCAAGAAGCAGCCTGTTTTCCAGATATTAT |
| | | CAGTGGACCACAACAGACCCAGAAGGTTTTTC |
| | | TTTTCATTAGAAACCGCACACTGCAGTTGTGGTTGGAT |
| | | AATCCAAAGATTCAGCTGACATTTGAGGCTAC |
| | | TCTCCAACAATTAGAAGCACCTTATAACAGTGATACTG |
| | | TGCTTGTCCACCGAGTTCACAGTTATTTAGAG |
| | | CGTCATGGTCTTATCAACTTCGGCATCTATAAGAGGAT |
| | | AAAACCCCTACCAACTAAAAAGACAGGAAAGG |
| | | TAATTATTATAGGCTCTGGGGTCTCAGGCTTGGCAGC |
| | | AGCTCGACAGTTACAAAGTTTTGGAATGGATGT |
| | | CACACTTTTGGAAGCCAGGGATCGTGTGGGTGGACGA |
| | | GTTGCCACATTTCGCAAAGGAAACTATGTAGCT |
| | | GATCTTGGAGCCATGGTGGTAACAGGTCTTGGAGGG |
| | | AATCCTATGGCTGTGGTCAGCAAACAAGTAAATA |
| | | TGGAACTGGCCAAGATCAAGCAAAAATGCCCACTTTA |
| | | TGAAGCCAACGGACAAGCTGACACTGTCAAGGT |
| | | TCCTAAAGAGAAAGATGAAATGGTAGAGCAAGAGTTT |
| | | AACCGGTTGCTAGAAGCTACATCTTACCTTAGT |
| | | CATCAACTAGACTTCAATGTCCTCAATAATAAGCCTGT |
| | | GTCCCTTGGCCAGGCATTGGAAGTTGTCATTC |
| | | AGTTACAAGAGAAGCATGTCAAAGATGAGCAGATTGA |
| | | ACATTGGAAGAAGATAGTGAAAACTCAGGAAGA |
| | | ATTGAAAGAACTTCTTAATAAGATGGTAAATTTGAAA |
| | | GAGAAAATTAAAGAACTCCATCAGCAATACAAA |
| | | GAAGCATCTGAAGTAAAGCCACCCAGAGATATTACTG |
| | | CCGAGTTCTTAGTGAAAAGCAAACACAGGGATC |
| | | TGACCGCCCTATGCAAGGAATATGATGAATTAGCTGA |
| | | AACACAAGGAAAGCTAGAAGAAAAACTTCAGGA |
| | | GTTGGAAGCGAATCCCCCAAGTGATGTATATCTCTCAT |
| | | CAAGAGACAGACAAATACTTGATTGGCATTTT |
| | | GCAAATCTTGAATTTGCTAATGCCACACCTCTCTCAACT |
| | | CTCTCCCTTAAGCACTGGGATCAGGATGATG |
| | | ACTTTGAGTTCACTGGCAGCCACCTGACAGTAAGGAA |
| | | TGGCTACTCGTGTGTGCCTGTGGCTTTAGCAGA |
| | | AGGCCTAGACATTAAACTGAATACAGCAGTGCGACAG |
| | | GTTCGCTACACGGCTTCAGGATGTGAAGTGATA |
| | | GCTGTGAATACCCGCTCCACGAGTCAAACCTTTATTTA |
| | | TAAATGCGACGCAGTTCTCTGTACCCTTCCCC |
| | | TGGGTGTGCTGAAGCAGCAGCCACCAGCCGTTCAGTT |
| | | TGTGCCACCTCTCCCTGAGTGGAAAACATCTGC |
| | | AGTCCAAAGGATGGGATTTGGCAACCTTAACAAGGTG |
| | | GTGTTGTGTTTTGATCGGGTGTTCTGGGATCCA |
| | | AGTGTCAATTTGTTCGGGCATGTTGGCAGTACGACTG |
| | | CCAGCAGGGGTGAGCTCTTCCTCTTCTGGAACC |
| | | TCTATAAAGCTCCAATACTGTTGGCACTAGTGGCAGG |
| | | AGAAGCTGCTGGTATCATGGAAAACATAAGTGA |
| | | CGATGTGATTGTTGGCCGATGCCTGGCCATTCTCAAA |
| | | GGGATTTTTGGTAGCAGTGCAGTACCTCAGCCC |
| | | AAAGAAACTGTGGTGTCTCGTTGGCGTGCTGATCCCT |
| | | GGGCTCGGGGCTCTTATTCCTATGTTGCTGCAG |
| | | GATCATCTGGAAATGACTATGATTTAATGGCTCAGCCA |
| | | ATCACTCCTGGCCCCTCGATTCCAGGTGCCCC |
| | | ACAGCCGATTCCACGACTCTTCTTTGCGGGAGAACATA |
| | | CGATCCGTAACTACCCAGCCACAGTGCATGGT |
| | | GCTCTGCTGAGTGGGCTGCGAGAAGCGGGAAGAATT |
| | | GCAGACCAGTTTTTGGGGGCCATGTATACGCTGC |
| | | CTCGCCAGGCCACACCAGGTGTTCCTGCACAGCAGTC |
| | | CCCAAGCATGTGAGACAGATGCATTCTAAGGGA |
| | | AGAGGCCCATGTGCCTGTTTCTGCCATGTAAGGAAGG |
| | | CTCTTCTAGCAATACTAGATCCCACTGAGAAAA |
| | | TCCACCCTGGCATCTGGGCTCCTGATCAGCTGATGGA |
| | | GCTCCTGATTTGACAAAGGAGCTTGCCTCCTTT |
| | | GAATGACCTAGAGCACAGGGAGGAACTTGTCCATTAG |
| | | TTTGGAATTGTGTTCTTCGTAAAGACTGAGGCA |
| | | AGCAAGTGCTGTGAAATAACATCATCTTAGTCCCTTGG |
| | | TGTGTGGGGTTTTTGTTTTTTTTTTATATTTT |
| | | GAGAATAAAACTTCATATAAAATTGGCAAAAAAAAAA |
| | | AAAAAAAA |
| KDM1A/LSD1/AOF2; | Isoform B; NCBI Reference | GGCGCGGCGGGAGCGCGCTTGGCGCGTGCGTACGCG |
| Gene ID: 23028 | Sequence: NM_015013.3 | ACGGCGGTTGGCGGCGCGCGGGCAGCGTGAAGCG |
| SEQ ID NO: 42 | | AGGCGAGGCAAGGCTTTTCGGACCCACGGAGCGACA |
| | | GAGCGAGCGGCCCCTACGGCCGTCGGCGGCCCGG |
| | | CGGCCCGAGATGTTATCTGGGAAGAAGGCGGCAGCC |
| | | GCGGCGGCGGCGGCTGCAGCGGCAGCAACCGGGA |
| | | CGGAGGCTGGCCCTGGGACAGCAGGCGGCTCCGAGA |
| | | ACGGGTCTGAGGTGGCCGCGCAGCCCGCGGGCCT |
| | | GTCGGGCCCAGCCGAGGTCGGGCCGGGGGCGGTGG |
| | | GGGAGCGCACACCCCGCAAGAAAGAGCCTCCGCGG |
| | | GCCTCGCCCCCCGGGGGCCTGGCGGAACCGCCGGGG |
| | | TCCGCAGGGCCTCAGGCCGGCCCTACTGTCGTGC |
| | | CTGGGTCTGCGACCCCCATGGAAACTGGAATAGCAGA |
| | | GACTCCGGAGGGGCGTCGGACCAGCCGGCGCAA |
| | | GCGGGCGAAGGTAGAGTACAGAGAGATGGATGAAA |
| | | GCTTGGCCAACCTCTCAGAAGATGAGTATTATTCA |
| | | GAAGAAGAGAGAAATGCCAAAGCAGAGAAGGAAAA |
| | | GAAGCTTCCCCCACCACCCCCTCAAGCCCCACCTG |
| | | AGGAAGAAAATGAAAGTGAGCCTGAAGAACCATCGG |
| | | GTGTGGAGGGCGCAGCTTTCCAGAGCCGACTTCC |
| | | TCATGACCGGATGACTTCTCAAGAAGCAGCCTGTTTTC |
| | | CAGATATTATCAGTGGACCACAACAGACCCAG |
| | | AAGGTTTTTCTTTTCATTAGAAACCGCACACTGCAGTT |
| | | GTGGTTGGATAATCCAAAGATTCAGCTGACAT |
| | | TTGAGGCTACTCTCCAACAATTAGAAGCACCTTATAAC |
| | | AGTGATACTGTGCTTGTCCACCGAGTTCACAG |
| | | TTATTTAGAGCGTCATGGTCTTATCAACTTCGGCATCT |
| | | ATAAGAGGATAAAACCCCTACCAACTAAAAAG |
| | | ACAGGAAAGGTAATTATTATAGGCTCTGGGGTCTCAG |
| | | GCTTGGCAGCAGCTCGACAGTTACAAAGTTTTG |
| | | GAATGGATGTCACACTTTTGGAAGCCAGGGATCGTGT |
| | | GGGTGGACGAGTTGCCACATTTCGCAAAGGAAA |
| | | CTATGTAGCTGATCTTGGAGCCATGGTGGTAACAGGT |
| | | CTTGGAGGGAATCCTATGGCTGTGGTCAGCAAA |
| | | CAAGTAAATATGGAACTGGCCAAGATCAAGCAAAAAT |
| | | GCCCACTTTATGAAGCCAACGGACAAGCTGTTC |
| | | CTAAAGAGAAAGATGAAATGGTAGAGCAAGAGTTTA |
| | | ACCGGTTGCTAGAAGCTACATCTTACCTTAGTCA |
| | | TCAACTAGACTTCAATGTCCTCAATAATAAGCCTGTGT |
| | | CCCTTGGCCAGGCATTGGAAGTTGTCATTCAG |
| | | TTACAAGAGAAGCATGTCAAAGATGAGCAGATTGAAC |
| | | ATTGGAAGAAGATAGTGAAAACTCAGGAAGAAT |
| | | TGAAAGAACTTCTTAATAAGATGGTAAATTTGAAAGA |
| | | GAAAATTAAAGAACTCCATCAGCAATACAAAGA |
| | | AGCATCTGAAGTAAAGCCACCCAGAGATATTACTGCC |
| | | GAGTTCTTAGTGAAAAGCAAACACAGGGATCTG |
| | | ACCGCCCTATGCAAGGAATATGATGAATTAGCTGAAA |
| | | CACAAGGAAAGCTAGAAGAAAAACTTCAGGAGT |
| | | TGGAAGCGAATCCCCCAAGTGATGTATATCTCTCATCA |
| | | AGAGACAGACAAATACTTGATTGGCATTTTGC |
| | | AAATCTTGAATTTGCTAATGCCACACCTCTCTCAACTCT |
| | | CTCCCTTAAGCACTGGGATCAGGATGATGAC |
| | | TTTGAGTTCACTGGCAGCCACCTGACAGTAAGGAATG |
| | | GCTACTCGTGTGTGCCTGTGGCTTTAGCAGAAG |
| | | GCCTAGACATTAAACTGAATACAGCAGTGCGACAGGT |
| | | TCGCTACACGGCTTCAGGATGTGAAGTGATAGC |
| | | TGTGAATACCCGCTCCACGAGTCAAACCTTTATTTATA |
| | | AATGCGACGCAGTTCTCTGTACCCTTCCCCTG |
| | | GGTGTGCTGAAGCAGCAGCCACCAGCCGTTCAGTTTG |
| | | TGCCACCTCTCCCTGAGTGGAAAACATCTGCAG |
| | | TCCAAAGGATGGGATTTGGCAACCTTAACAAGGTGGT |
| | | GTTGTGTTTTGATCGGGTGTTCTGGGATCCAAG |
| | | TGTCAATTTGTTCGGGCATGTTGGCAGTACGACTGCCA |
| | | GCAGGGGTGAGCTCTTCCTCTTCTGGAACCTC |
| | | TATAAAGCTCCAATACTGTTGGCACTAGTGGCAGGAG |
| | | AAGCTGCTGGTATCATGGAAAACATAAGTGACG |
| | | ATGTGATTGTTGGCCGATGCCTGGCCATTCTCAAAGG |
| | | GATTTTTGGTAGCAGTGCAGTACCTCAGCCCAA |
| | | AGAAACTGTGGTGTCTCGTTGGCGTGCTGATCCCTGG |
| | | GCTCGGGGCTCTTATTCCTATGTTGCTGCAGGA |
| | | TCATCTGGAAATGACTATGATTTAATGGCTCAGCCAAT |
| | | CACTCCTGGCCCCTCGATTCCAGGTGCCCCAC |
| | | AGCCGATTCCACGACTCTTCTTTGCGGGAGAACATACG |
| | | ATCCGTAACTACCCAGCCACAGTGCATGGTGC |
| | | TCTGCTGAGTGGGCTGCGAGAAGCGGGAAGAATTGC |
| | | AGACCAGTTTTTGGGGGCCATGTATACGCTGCCT |
| | | CGCCAGGCCACACCAGGTGTTCCTGCACAGCAGTCCC |
| | | CAAGCATGTGAGACAGATGCATTCTAAGGGAAG |
| | | AGGCCCATGTGCCTGTTTCTGCCATGTAAGGAAGGCT |
| | | CTTCTAGCAATACTAGATCCCACTGAGAAAATC |
| | | CACCCTGGCATCTGGGCTCCTGATCAGCTGATGGAGC |
| | | TCCTGATTTGACAAAGGAGCTTGCCTCCTTTGA |
| | | ATGACCTAGAGCACAGGGAGGAACTTGTCCATTAGTT |
| | | TGGAATTGTGTTCTTCGTAAAGACTGAGGCAAG |
| | | CAAGTGCTGTGAAATAACATCATCTTAGTCCCTTGGTG |
| | | TGTGGGGTTTTTGTTTTTTTTTTATATTTTGA |
| | | GAATAAAACTTCATATAAAATTGGCAAAAAAAAAAAA |
| | | AAAAAA |

[0374] “LSD1 inhibitor” as the term is used herein, refers to a molecule, or a group of molecules (e.g., a system) that reduces or eliminates the function and/or expression of LSD1. In embodiments, an LSD1 inhibitor is a molecule that inhibits the expression of LSD1 e.g., reduces or eliminates expression of LSD1. In embodiments, the LSD1 inhibitor is a molecule that inhibits the function of LSD1. An example of an LSD1 inhibitor that inhibits the expression of LSD1 is a gene editing system, e.g., as described herein, that is targeted to nucleic acid within the LSD1 gene (e.g., within the KDM1A gene), or its regulatory elements, such that modification of the nucleic acid at or near the gene editing system binding site(s) is modified to reduce or eliminate expression of LSD1. Another example of an LSD1 inhibitor that inhibits the expression of LSD1 is a nucleic acid molecule, e.g., RNA molecule, e.g., a short hairpin RNA (shRNA) or short interfering RNA (siRNA), capable of hybridizing with LSD1 mRNA and causing a reduction or elimination of LSD1 translation. Another example of an LSD1 inhibitor that inhibits the expression of LSD1 is an antisense oligonucleotide. LSD1 inhibitors also include nucleic acids encoding molecules which inhibit LSD1 expression (e.g., nucleic acid encoding an anti-LSD1 shRNA or siRNA, or nucleic acid encoding one or more, e.g., all, components of an anti-LSD1 gene editing system). An example of a molecule that inhibits the function of LSD1 is a molecule, e.g., a protein or small molecule which inhibits one or more activities of LSD1. An example is a small molecule inhibitor of LSD1, e.g., as described herein. In an exemplary embodiment, a small molecule LSD1 inhibitor is a reversible LSD1 inhibitor. In another exemplary embodiment, a small molecule LSD1 inhibitor is an irreversible LSD1 inhibitor. A small molecule LSD1 inhibitor may bind LSD1 at the catalytic site or at a site other than the catalytic site. Another example is a dominant negative LSD1 protein. Another example is an anti-LSD1 antibody or antigen-binding fragment thereof. Another example is a molecule, e.g., a small molecule, which inhibits an LSD1 binding partner. LSD1 inhibitors also include nucleic acids encoding inhibitors of LSD1 function. Further description of LSD1 inhibitors is provided below in the section titled “LSD1 inhibitors.”

[0375] A “binding partner” as the term is used herein in the context of an LSD1 binding partner, refers to a molecule, e.g., a protein, which interacts, e.g., binds to, LSD1 protein. Without being bound by theory, it is believed that LSD1 binds to one or more HDAC proteins, e.g., HDAC1. Such HDAC proteins are considered examples of LSD1 binding partners. Other LSD1 binding partners include, for example, proteins of the Co-REST/REST complex, e.g., HDAC1, HDAC2, p40, p80, Co-REST and ZNF217 (Lee, M. G., Wynder, C., Cooch, N. & Shiekhattar, R. An essential role for CoREST in nucleosomal histone 3 lysine 4 demethylation. Nature 437, 432-435 (2005)); proteins of the Blimp1 complex (Mol Cell Biol. 2009 March; 29(6):1421-31. doi: 10.1128/MCB.01158-08. Epub 2009 Jan. 5); proteins of the NuRD complex (Cell. 2009 Aug. 21; 138(4):660-72. doi: 10.1016/j.cell.2009.05.050); and the androgen receptor (Nature. 2005 Sep. 15; 437(7057):436-9. Epub 2005 Aug. 3).

[0376] A “system” as the term is used herein in connection with, for example, gene editing, refers to a group of molecules, e.g., one or more molecules, which together act to produce a desired function.

[0377] A “gene editing system” as the term is used herein, refers to a system, e.g., one or more molecules, that direct and effect an alteration, e.g., a deletion, of one or more nucleic acids at or near a site of genomic DNA targeted by said system. Gene editing systems are known in the art, and are described more fully below.

[0378] A “dominant negative” gene product or protein is one that interferes with the function of a gene product or protein. The gene product affected can be the same or different from the dominant negative protein. Dominant negative gene products can be of many forms, including truncations, full length proteins with point mutations or fragments thereof, or fusions of full length wild type or mutant proteins or fragments thereof with other proteins. The level of inhibition observed can be very low. For example, it may require a large excess of the dominant negative protein compared to the functional protein or proteins involved in a process in order to see an effect. It may be difficult to see effects under normal biological assay conditions. In one embodiment, a dominant negative LSD1 is a catalytically inactive LSD1.

[0379] The term “proportion” refers to the ratio of the specified molecule to the total number of molecules in a population. In an exemplary embodiment, a proportion of T cells having a specific phenotype (e.g., T_{SCM} cells) refers to the ratio of the number of T cells having that phenotype relative to the total number of T cells in a population. In an exemplary embodiment, a proportion of T cells having a specific phenotype (e.g., CD45RA+CD62L+ cells) refers to the ratio of the number of T cells having that phenotype relative to the total number of T cells in a population. It will be understood that such proportions may be measured against certain subsets of cells, where indicted. For example, the proportion of CD4+T_{SCM} cells may be measured against the total number of CD4+ T cells.

[0380] The term “population of immune effector cells” as used herein refers to a composition comprising at least two, e.g., two or more, e.g., more than one, immune effector cell, and does not denote any level of purity or the presence or absence of other cell types. In an exemplary embodiment, the population is substantially free of other cell types. In another exemplary embodiment, the population comprises at least two cells of the specified cell type, or having the specified function or property.

[0381] The terms “T_{SCM}-like cell,” “naïve T Cell” and “naïve T cell” are used interchangeably and refer to a less differentiated T cell state, that is characterized by surface expression of CD45RA and CD62L (e.g., is CD45RA positive and CD62L positive (sometimes written as CD45RA+CD62L+)). In general, T cell differentiation proceeds, from most “naive” to most “exhausted,” T_{SCM}-like (e.g., a CD45RA+CD62L+ cell)>T_{CM} (e.g., a CD45RA-CD62L+ cell)>T_{EM} (e.g., a CD45RA-CD62L-cell)>T_{EFF}. Naive T cells may be characterized, for example, as having increased self-renewal, anti-tumor efficacy, proliferation and/or survival, relative to a more exhausted T cell phenotype. In an exemplary embodiment, a naive T cell refers to a CD45RA+CD62L+ T cell. In another exemplary embodiment, a naive T cell refers to a T_{SCM} cell, e.g., a CD45RA+CD62L+CCR7+CD27+CD95+ T cell.

[0382] The term “T_{SCM}” refers to a T cell having a stem cell memory phenotype, characterized in that it expresses CD45RA, CD62L, CCR7, CD27 and CD95 on its cell surface (e.g., is CD45RA positive, CD62L positive, CCR7 positive, CD27 positive and CD95 positive (sometimes written as CD45RA+CD62L+CCR7+CD27+CD95+)). A T_{SCM} cell is an example of a naive T cell. The T cell may be CD4+ and/or CD8+ T cell.

[0383] Ranges: throughout this disclosure, various aspects of the invention can be presented in a range format. It should be understood that the description in range format is merely for convenience and brevity and should not be construed as an inflexible limitation on the scope of the invention. Accordingly, the description of a range should be considered to have specifically disclosed all the possible subranges as well as individual numerical values within that range. For example, description of a range such as from 1 to 6 should be considered to have specifically disclosed subranges such as from 1 to 3, from 1 to 4, from 1 to 5, from 2 to 4, from 2 to 6, from 3 to 6 etc., as well as individual numbers within that range, for example, 1, 2, 2.7, 3, 4, 5, 5.3, and 6. As another example, a range such as 95-99% identity, includes something with 95%, 96%, 97%, 98% or 99% identity, and includes subranges such as 96-99%, 96-98%, 96-97%, 97-99%, 97-98% and 98-99% identity. This applies regardless of the breadth of the range.

[0384] Headings, sub-headings or numbered or lettered elements, e.g., (a), (b), (i) etc, are presented merely for ease of reading. The use of headings or numbered or lettered elements in this document does not require the steps or elements be performed in alphabetical order or that the steps or elements are necessarily discrete from one another.

[0385] All publications, patent applications, patents, and other references mentioned herein are incorporated by reference in their entirety.

[0386] Other features, objects, and advantages of the invention will be apparent from the description and drawings, and from the claims.

### LSD1 Inhibitors

[0387] Any molecule that inhibits LSD1 may be useful in the aspects of the invention described herein, e.g., in connection with the cells, compositions and methods disclosed herein. The following sections provide exemplary LSD1 inhibitors, and are not intended to be limiting.

[0388] In embodiments, the LSD1 inhibitor is a molecule or system that results in increased or prolonged proliferation or persistence of CAR-expressing cells with a naive phenotype (e.g., T_{SCM} cells), e.g., in culture or in a subject, e.g., as compared to non-treated CAR-expressing cells or a non-treated subject. In embodiments, increased proliferation or persistence is associated with in an increase in the number of CAR-expressing cells. Methods for measuring increased or prolonged proliferation are described in Example 4. In another embodiment, administration or contacting with an LSD1 inhibitor results in increased cytokine release or increased killing of cancer cells by CAR-expressing cells, e.g., in culture or in a subject, e.g., as compared to non-treated CAR-expressing cells or a non-treated subject. Methods for measuring increased cytokine release are described in, e.g., Example 4. In embodiments, increased killing of cancer cells is associated with in a decrease in tumor volume. Methods for measuring increased killing of cancer cells are described in Example 4 and, e.g., in International Application WO2014/153270, which is herein incorporated by reference in its entirety.

### Nucleic Acid Inhibitors

[0389] In one aspect the LSD1 inhibitor is a nucleic acid molecule. In embodiments, the nucleic acid is a DNA molecule, e.g., an antisense oligonucleotide (e.g., Watts et al., J. Pathol., 2012, 226(2), pp. 365-379). In an embodiment, the antisense oligonucleotide is complementary to an LSD1 mRNA or pre-mRNA molecule. In another aspect, the LSD1 inhibitor includes nucleic acid encoding said antisense oligonucleotide.

[0390] In embodiments, the nucleic acid LSD1 inhibitor is an interfering RNA molecule, e.g., a shRNA or siRNA, that inhibits expression, e.g., translation, of LSD1. In another aspect, the LSD1 inhibitor includes nucleic acid encoding said interfering RNA molecule. In embodiments, the interfering RNA molecule, e.g., a shRNA or siRNA, that inhibits expression, e.g., translation, of LSD1 comprises a domain complementary to a sequence of an LSD1 mRNA (such sequence referred to herein in relation to an interfering RNA molecule, e.g., a shRNA or siRNA, as a “target sequence”). Examples of such target sequences are provided in Table 1.

[0391] Exemplary Target Sequences for shRNA and siRNA LSD1 inhibitors, and exemplary nucleic acids encoding shRNA LSD1 inhibitors are provided in Table 1 below,

TABLE 1

| | | | SEQ | | |
|---|---|---|---|---|---|
| | | | ID | | SEQ ID |
| TARGET | SHRNA_NAME | Target Sequence | NO: | Sequence encoding anti-LSD1 shRNA | NO: |
| AOF2 | KDM1A- | CCGAGTTCACAGTTATTT | 43 | CCGAGTTCACAGTTATTTAGACTCGAGTCTA | 83 |
| | 917_58263 | AGA | | AATAACTGTGAACTCGGTTTTTTGAATTCGCA | |
| | | | | CCAGCACGCTACGCAACACGTTGACGTTGAC | |
| | | | | CACATGTTCGCCGTCTTC | |
| AOF2 | KDM1A- | CGGACAAGCTGTTCCTAA | 44 | CGGACAAGCTGTTCCTAAAGACTCGAGTCTT | 84 |
| | 1265_58264 | AGA | | TAGGAACAGCTTGTCCGTTTTTTGAATTCGCA | |
| | | | | CCAGCACGCTACGCAGTCAGTTGACGTTGAC | |
| | | | | CAACGTTTCGCCGTCTTC | |
| AOF2 | KDM1A- | GAATTGTGTTCTTCGTAA | 45 | GAATTGTGTTCTTCGTAAAGACTCGAGTCTTT | 85 |
| | 2928_58265 | AGA | | ACGAAGAACACAATTCTTTTTTGAATTCGCAC | |
| | | | | CAGCACGCTACGCATGACGTTGACGTTGACC | |
| | | | | AACCATTCGCCGTCTTC | |
| AOF2 | KDM1A- | CCACCGAGTTCACAGTTA | 46 | CCACCGAGTTCACAGTTATTTCTCGAGAAAT | 86 |
| | 914_58266 | TTT | | AACTGTGAACTCGGTGGTTTTTTGAATTCGC | |
| | | | | ACCAGCACGCTACGCAACGTGTTGACGTTGA | |
| | | | | CCAACACTTCGCCGTCTTC | |
| AOF2 | KDM1A- | CAGGAAAGGTAATTATT | 47 | CAGGAAAGGTAATTATTATAGCTCGAGCTAT | 87 |
| | 1000_58267 | ATAG | | AATAATTACCTTTCCTGTTTTTTGAATTCGCAC | |
| | | | | CAGCACGCTACGCACATGGTTGACGTTGACC | |
| | | | | AACTGTTCGCCGTCTTC | |
| AOF2 | KDM1A- | GCCTGTTTCTGCCATGTA | 48 | GCCTGTTTCTGCCATGTAAGGCTCGAGCCTT | 88 |
| | 2759_58268 | AGG | | ACATGGCAGAAACAGGCTTTTTTGAATTCGC | |
| | | | | ACCAGCACGCTACGCATGACGTTGACGTTGA | |
| | | | | CCATGGTTTCGCCGTCTTC | |
| AOF2 | KDM1A- | GACAGGAAAGGTAATTA | 49 | GACAGGAAAGGTAATTATTATCTCGAGATAA | 89 |
| | 998_58269 | TTAT | | TAATTACCTTTCCTGTCTTTTTTGAATTCGCAC | |
| | | | | CAGCACGCTACGCAACTGGTTGACGTTGACC | |
| | | | | ATGCATTCGCCGTCTTC | |
| AOF2 | KDM1A- | AGCTGTTCCTAAAGAGA | 50 | AGCTGTTCCTAAAGAGAAAGACTCGAGTCTT | 90 |
| | 1271_58270 | AAGA | | TCTCTTTAGGAACAGCTTTTTTTGAATTCGCA | |
| | | | | CCAGCACGCTACGCACACAGTTGACGTTGAC | |
| | | | | CATGACTTCGCCGTCTTC | |
| AOF2 | KDM1A- | CGAGTCAAACCTTTATTT | 51 | CGAGTCAAACCTTTATTTATACTCGAGTATAA | 91 |
| | 1996_58271 | ATA | | ATAAAGGTTTGACTCGTTTTTTGAATTCGCAC | |
| | | | | CAGCACGCTACGCAGTGTGTTGACGTTGACC | |
| | | | | ATGTGTTCGCCGTCTTC | |
| AOF2 | KDM1A- | GGCTACTCTCCAACAATT | 52 | GGCTACTCTCCAACAATTAGACTCGAGTCTA | 92 |
| | 863_58272 | AGA | | ATTGTTGGAGAGTAGCCTTTTTTGAATTCGC | |
| | | | | ACCAGCACGCTACGCAGTACGTTGACGTTGA | |
| | | | | CACGTGTTTCGCCGTCTTC | |
| AOF2 | KDM1A- | GCAGCTCGACAGTTACA | 53 | GCAGCTCGACAGTTACAAAGTCTCGAGACTT | 93 |
| | 1044_58273 | AAGT | | TGTAACTGTCGAGCTGCTTTTTTGAATTCGCA | |
| | | | | CCAGCACGCTACGCATGTGGTTGACGTTGAC | |
| | | | | ACGTCATTCGCCGTCTTC | |
| AOF2 | KDM1A- | CAGAAGGCCTAGACATT | 54 | CAGAAGGCCTAGACATTAAACCTCGAGGTTT | 94 |
| | 1903_58274 | AAAC | | AATGTCTAGGCCTTCTGTTTTTTGAATTCGCA | |
| | | | | CCAGCACGCTACGCAACCAGTTGACGTTGAC | |
| | | | | ACGTACTTCGCCGTCTTC | |
| AOF2 | KDM1A- | AGATGAGTATTATTCAGA | 55 | AGATGAGTATTATTCAGAAGACTCGAGTCTT | 95 |
| | 563_58275 | AGA | | CTGAATAATACTCATCTTTTTTTGAATTCGCA | |
| | | | | CCAGCACGCTACGCACAGTGTTGACGTTGAC | |
| | | | | ACGTTGTTCGCCGTCTTC | |
| AOF2 | KDM1A- | CAATTAGAAGCACCTTAT | 56 | CAATTAGAAGCACCTTATAACCTCGAGGTTA | 96 |
| | 876_58276 | AAC | | TAAGGTGCTTCTAATTGTTTTTTGAATTCGCA | |
| | | | | CCAGCACGCTACGCATGTGGTTGACGTTGAC | |
| | | | | ACCAGTTTCGCCGTCTTC | |
| AOF2 | KDM1A- | GGAACTTGTCCATTAGTT | 57 | GGAACTTGTCCATTAGTTTGGCTCGAGCCAA | 97 |
| | 2908_58277 | TGG | | ACTAATGGACAAGTTCCTTTTTTGAATTCGCA | |
| | | | | CCAGCACGCTACGCAACGTGTTGACGTTGAC | |
| | | | | ACCACATTCGCCGTCTTC | |
| AOF2 | KDM1A- | GCACCTTATAACAGTGAT | 58 | GCACCTTATAACAGTGATACTCTCGAGAGTA | 98 |
| | 885_58278 | ACT | | TCACTGTTATAAGGTGCTTTTTTGAATTCGCA | |
| | | | | CCAGCACGCTACGCACAACGTTGACGTTGAC | |
| | | | | ACCAACTTCGCCGTCTTC | |
| AOF2 | KDM1A- | GGCATCTATAAGAGGAT | 59 | GGCATCTATAAGAGGATAAAACTCGAGTTTT | 99 |
| | 960_58279 | AAAA | | ATCCTCTTATAGATGCCTTTTTTGAATTCGCA | |
| | | | | CCAGCACGCTACGCAGTCAGTTGACGTTGAC | |
| | | | | ACCATGTTCGCCGTCTTC | |
| AOF2 | KDM1A- | CATTGGAAGTTGTCATTC | 60 | CATTGGAAGTTGTCATTCAGTCTCGAGACTG | 100 |
| | 1399_58280 | AGT | | AATGACAACTTCCAATGTTTTTTGAATTCGCA | |
| | | | | CCAGCACGCTACGCAACGTGTTGACGTTGAC | |
| | | | | ACACGTTTCGCCGTCTTC | |
| AOF2 | KDM1A- | TGGAAATGACTATGATTT | 61 | TGGAAATGACTATGATTTAATCTCGAGATTA | 101 |
| | 2474_58281 | AAT | | AATCATAGTCATTTCCATTTTTTGAATTCGCA | |
| | | | | CCAGCACGCTACGCACACAGTTGACGTTGAC | |
| | | | | ACACCATTCGCCGTCTTC | |
| AOF2 | KDM1A_NM_015013.3_21174 | CGGTTGCTAGAAGCTAC | 62 | GAAGACGCACCGGCGGTTGCTAGAAGTTAC | 102 |
| | | ATCT | | ATTTGTTAATATTCATAGCAGATGTAGCTTCT | |
| | | | | AGCAACCGTTTTTTGAATTCGCACCAGCACG | |
| | | | | CTACGCAACGTGTCACAGTACACTGCAACTT | |
| | | | | CGCCGT | |
| AOF2 | KDM1A_NM_015013.3_21173 | GCCACATTTCGCAAAGG | 63 | GAAGACGCACCGGGCCACATTTCGTAAAGG | 103 |
| | | AAAC | | AAATGTTAATATTCATAGCGTTTCCTTTGCGA | |
| | | | | AATGTGGCTTTTTTGAATTCGCACCAGCACG | |
| | | | | CTACGCATGACGTCACAGTACACTGCACATT | |
| | | | | CGCCGT | |
| AOF2 | KDM1A_NM_015013.3_21172 | CCTCATGACCGGATGACT | 64 | GAAGACGCACCGGCCTCATGACTGGATGATT | 104 |
| | | TCT | | TCTGTTAATATTCATAGCAGAAGTCATCCGGT | |
| | | | | CATGAGGTTTTTTGAATTCGCACCAGCACGC | |
| | | | | TACGCAGTCAGTCACAGTACACTGCAGTTTC | |
| | | | | GCCGT | |
| AOF2 | KDM1A_NM_015013.3_21171 | CGAGTTGCCACATTTCGC | 65 | GAAGACGCACCGGCGAGTTGCCATATTTCGT | 105 |
| | | AAA | | AAAGTTAATATTCATAGCTTTGCGAAATGTG | |
| | | | | GCAACTCGTTTTTTGAATTCGCACCAGCACGC | |
| | | | | TACGCAACACGTCACAGTACACTGGTTGTTC | |
| | | | | GCCGT | |
| AOF2 | KDM1A_NM_015013.3_21170 | CGTCATGGTCTTATCAAC | 66 | GAAGACGCACCGGCGTCATGGTCTTATCAAT | 106 |
| | | TTC | | TTCGTTAATATTCATAGCGAAGTTGATAAGA | |
| | | | | CCATGACGTTTTTTGAATTCGCACCAGCACGC | |
| | | | | TACGCATGTGGTCACAGTACACTGGTACTTC | |
| | | | | GCCGT | |
| AOF2 | KDM1A_NM_015013.3_21169 | GAGCGTCATGGTCTTATC | 67 | GAAGACGCACCGGGAGCGTTATGGTCTTATT | 107 |
| | | AAC | | AACGTTAATATTCATAGCGTTGATAAGACCA | |
| | | | | TGACGCTCTTTTTTGAATTCGCACCAGCACGC | |
| | | | | TACGCAGTCAGTCACAGTACACTGGTCATTC | |
| | | | | GCCGT | |
| AOF2 | KDM1A_NM_015013.3_21168 | CCGGATGACTTCTCAAGA | 68 | GAAGACGCACCGGCCGGATGACTTCTTAAG | 108 |
| | | AGC | | AAGTGTTAATATTCATAGCGCTTCTTGAGAA | |
| | | | | GTCATCCGGTTTTTTGAATTCGCACCAGCACG | |
| | | | | CTACGCACAGTGTCACAGTACACTGGTGTTT | |
| | | | | CGCCGT | |
| AOF2 | KDM1A_NM_015013.3_21167 | CACAGGGAGGAACTTGT | 69 | GAAGACGCACCGGCACAGGGAGGAATTTGT | 109 |
| | | CCAT | | CTATGTTAATATTCATAGCATGGACAAGTTCC | |
| | | | | TCCCTGTGTTTTTTGAATTCGCACCAGCACGC | |
| | | | | TACGCAGTACGTCACAGTACACACTGTGTTC | |
| | | | | GCCGT | |
| AOF2 | KDM1A_NM_015013.3_21166 | GCCTCCTTTGAATGACCT | 70 | GAAGACGCACCGGGCCTTCTTTGAATGACTT | 110 |
| | | AGA | | AGAGTTAATATTCATAGCTCTAGGTCATTCAA | |
| | | | | AGGAGGCTTTTTTGAATTCGCACCAGCACGC | |
| | | | | TACGCACATGGTCACAGTACACACTGACTTC | |
| | | | | GCCGT | |
| AOF2 | KDM1A_NM_015013.3_21165 | CCTATGGCTGTGGTCAGC | 71 | GAAGACGCACCGGCCTATGGTTGTGGTCAGT | 111 |
| | | AAA | | AAAGTTAATATTCATAGCTTTGCTGACCACA | |
| | | | | GCCATAGGTTTTTTGAATTCGCACCAGCACG | |
| | | | | CTACGCAACCAGTCACAGTACACACTGCATT | |
| | | | | CGCCGT | |
| AOF2 | KDM1A_NM_015013.3_21164 | GAGCTTGCCTCCTTTGAA | 72 | GAAGACGCACCGGGAGCTTGTGTTCTTTGAA | 112 |
| | | TGA | | TGAGTTAATATTCATAGCTCATTCAAAGGAG | |
| | | | | GCAAGCTCTTTTTTGAATTCGCACCAGCACGC | |
| | | | | TACGCATGGTGTCACAGTACACACTGGTTTC | |
| | | | | GCCGT | |
| AOF2 | KDM1A_NM_015013.3_21163 | CAGGTCTTGGAGGGAAT | 73 | GAAGACGCACCGGCAGGTCTTGGAGGGGAT | 113 |
| | | CCTA | | CTTAGTTAATATTCATAGCTAGGATTCCCTCC | |
| | | | | AAGACCTGTTTTTTGAATTCGCACCAGCACG | |
| | | | | CTACGCACACAGTCACAGTACACACACTGTT | |
| | | | | CGCCGT | |
| AOF2 | KDM1A_NM_015013.3_21162 | CAGTACCTCAGCCCAAAG | 74 | GAAGACGCACCGGCAGTACTTCAGCCTAAA | 114 |
| | | AAA | | GAAAGTTAATATTCATAGCTTTCTTTGGGCTG | |
| | | | | AGGTACTGTTTTTTGAATTCGCACCAGCACG | |
| | | | | CTACGCAACACGTCACAGTACACACACACTT | |
| | | | | CGCCGT | |
| AOF2 | KDM1A_NM_015013.3_21161 | CTGGCCATTCTCAAAGGG | 75 | GAAGACGCACCGGCTGGCTATTCTTAAAGG | 115 |
| | | ATT | | GATTGTTAATATTCATAGCAATCCCTTTGAGA | |
| | | | | ATGGCCAGTTTTTTGAATTCGCACCAGCACG | |
| | | | | CTACGCATGGTGTCACAGTACACACACCATT | |
| | | | | CGCCGT | |
| AOF2 | KDM1A_NM_015013.3_21160 | GCCATGGTGGTAACAGG | 76 | GAAGACGCACCGGGCCATGGTGGTAATAGG | 116 |
| | | TCTT | | TCTTGTTAATATTCATAGCAAGACCTGTTACC | |
| | | | | ACCATGGCTTTTTTGAATTCGCACCAGCACGC | |
| | | | | TACGCAGTTGGTCACAGTACACACACGTTTC | |
| | | | | GCCGT | |
| AOF2 | KDM1A_NM_0150113_21159 | CAGGAGAAGCTGCTGGT | 77 | GAAGACGCACCGGCAGGAGAAGCTGTTGGT | 117 |
| | | ATCA | | ATTAGTTAATATTCATAGCTGATACCAGCAG | |
| | | | | CTTCTCCTGTTTTTTGAATTCGCACCAGCACG | |
| | | | | CTACGCAACGTGTCACAGTACACACCATGTT | |
| | | | | CGCCGT | |
| AOF2 | KDM1A_NM_015013.3_15448 | CCACGAGTCAAACCTTTA | 78 | GAAGACGCACCGGCCACGAGTCAAATCTTTA | 118 |
| | | TTT | | TTTGTTAATATTCATAGCAAATAAAGGTTTGA | |
| | | | | CTCGTGGTTTTTTGAATTCGCACCAGCACGCT | |
| | | | | ACGCACACAGTGTTGTGGTCACAACGTTTCG | |
| | | | | CCGT | |
| AOF2 | KDM1A_NM_015013.3_15447 | GCTACATCTTACCTTAGT | 79 | GAAGACGCACCGGGCTACATCTTACCTTAGT | 119 |
| | | CAT | | TATGTTAATATTCATAGCATGACTAAGGTAA | |
| | | | | GATGTAGCTTTTTTGAATTCGCACCAGCACG | |
| | | | | CTACGCATGACGTGTTGTGGTCACACATGTT | |
| | | | | CGCCGT | |
| AOF2 | KDM1A- | CCGGATGACTTCTCAAGA | 80 | CCGGATGACTTCTCAAGAAGCCTCGAGGCTT | 120 |
| | 725_58282 | AGC | | CTTGAGAAGTCATCCGGTTTTTTGAATTCGCA | |
| | | | | CCAGCACGCTACGCAGTTGGTTGACGTTGAC | |
| | | | | ACACACTTCGCCGTCTTC | |
| AOF2 | KDM1A_NM_015013.3_15445 | GCTCCAATACTGTTGGCA | 81 | GAAGACGCACCGGGCTCCAATATTGTTGGCA | 121 |
| | | CTA | | TTAGTTAATATTCATAGCTAGTGCCAACAGTA | |
| | | | | TTGGAGCTTTTTTGAATTCGCACCAGCACGCT | |
| | | | | ACGCACACAGTGTTGTGGTCACACACATTCG | |
| | | | | CCGT | |
| AOF2 | KDM1A_NM_015013.3_15446 | CCAACAATTAGAAGCACC | 82 | GAAGACGCACCGGCCAACAATTAGAAGCAT | 122 |
| | | TTA | | CTTAGTTAATATTCATAGCTAAGGTGCTTCTA | |
| | | | | ATTGTTGGTTTTTTGAATTCGCACCAGCACGC | |
| | | | | TACGCAGTTGGTGTTGTGGTCACACAACTTC | |
| | | | | GCCGT | |

[0392] Nucleic acid LSD1 inhibitor molecules include nucleic acid molecules comprising chemical modifications, e.g., modifications to the nucleic acid base, the sugar and/or the phosphate backbone, including, for example, peptide nucleic acids, phospho morpholino backbones, phosphorothioate backbones, 5′ and 3′ end caps, 2′-Omethyl modification, 2′-F modifications, and other modifications known in the art.

### Genome Editing System LSD1 Inhibitors

[0393] Genome editing systems are known in the art, and include zinc finger nuclease gene editing systems, TALEN gene editing systems, meganuclease gene editing systems, and CRISPR gene editing systems. As used herein, the term “genome editing system” (used herein synonymously with “gene editing system”) refers to a molecule or set of molecules necessary and sufficient to direct modification, e.g., insertion or deletion, of nucleic acids, at or near a site targeted by said system. As the term is used herein, the term “genome editing system” also refers to nucleic acid encoding one or more components (e.g., molecules) of the genome editing system. Exemplary gene editing systems are known in the art, and are described more fully below.

### CRISPR Gene Editing Systems

[0394] As used herein, the terms “CRISPR System” “CRISPR/Cas System”, “CRISPR/Cas gene editing system”, “CRISPR/Cas genome editing system”, “CRISPR genome editing system” and “CRISPR gene editing system” are used synonymously herein. Naturally-occurring CRISPR systems are found in approximately 40% of sequenced eubacteria genomes and 90% of sequenced archaea. Grissa et al. (2007) BMC Bioinformatics 8: 172. This system is a type of prokaryotic immune system that confers resistance to foreign genetic elements such as plasmids and phages and provides a form of acquired immunity. Barrangou et al. (2007) Science 315: 1709-1712; Marragini et al. (2008) Science 322: 1843-1845.

[0395] The CRISPR system has been modified for use in gene editing (silencing, enhancing or changing specific genes) in eukaryotes such as mice, primates and humans. Wiedenheft et al. (2012) Nature 482: 331-8. This is accomplished by, for example, introducing into the eukaryotic cell one or more vectors encoding a specifically engineered guide RNA (gRNA) (e.g., a gRNA comprising sequence complementary to sequence of a eukaryotic genome) and one or more appropriate RNA-guided nucleases, e.g., Cas proteins. The RNA guided nuclease forms a complex with the gRNA, which is then directed to the target DNA site by hybridization of the gRNA's sequence to complementary sequence of a eukaryotic genome, where the RNA-guided nuclease then induces a double or single-strand break in the DNA. Insertion or deletion of nucleotides at or near the strand break creates the modified genome.

[0396] As these naturally occur in many different types of bacteria, the exact arrangements of the CRISPR and structure, function and number of Cas genes and their product differ somewhat from species to species. Haft et al. (2005) PLoS Comput. Biol. 1: e60; Kunin et al. (2007) Genome Biol. 8: R61; Mojica et al. (2005) J. Mol. Evol. 60: 174-182; Bolotin et al. (2005) Microbiol. 151: 2551-2561; Pourcel et al. (2005) Microbiol. 151: 653-663; and Stern et al. (2010) Trends. Genet. 28: 335-340. For example, the Cse (Cas subtype, E. coli) proteins (e.g., CasA) form a functional complex, Cascade, that processes CRISPR RNA transcripts into spacer-repeat units that Cascade retains. Brouns et al. (2008) Science 321: 960-964. In other prokaryotes, Cas6 processes the CRISPR transcript. The CRISPR-based phage inactivation in E. coli requires Cascade and Cas3, but not Cas1 or Cas2. The Cmr (Cas RAMP module) proteins in Pyrococcus furiosus and other prokaryotes form a functional complex with small CRISPR RNAs that recognizes and cleaves complementary target RNAs. A simpler CRISPR system relies on the protein Cas9, which is a nuclease with two active cutting sites, one for each strand of the double helix. Combining Cas9 and modified CRISPR locus RNA can be used in a system for gene editing. Pennisi (2013) Science 341: 833-836.

[0397] With respect to general information on CRISPR-Cas Systems, components thereof, and delivery of such components, including methods, materials, delivery vehicles, vectors, particles, AAV, and making and using thereof, including as to amounts and formulations, all useful in the practice of the instant invention, reference is made to: U.S. Pat. Nos. 8,697,359, 8,771,945, 8,795,965, 8,865,406, 8,871,445, 8,889,356, 8,889,418 and 8,895,308; US Patent Publications US 2014-0310830 (U.S. application Ser. No. 14/105,031), US 2014-0287938 A1 (U.S. application Ser. No. 14/213,991), US 2014-0273234 A1 (U.S. application Ser. No. 14/293,674), US2014-0273232 A1 (U.S. application Ser. No. 14/290,575), US 2014-0273231 (U.S. application Ser. No. 14/259,420), US 2014-0256046 A1 (U.S. application Ser. No. 14/226,274), US 2014-0248702 A1 (U.S. application Ser. No. 14/258,458), US 2014-0242700 A1 (U.S. application Ser. No. 14/222,930), US 2014-0242699 A1 (U.S. application Ser. No. 14/183,512), US 2014-0242664 A1 (U.S. application Ser. No. 14/104,990), US 2014-0234972 A1 (U.S. application Ser. No. 14/183,471), US 2014-0227787 A1 (U.S. application Ser. No. 14/256,912), US 2014-0189896 A1 (U.S. application Ser. No. 14/105,035), US 2014-0186958 (U.S. application Ser. No. 14/105,017), US 2014-0186919 A1 (U.S. application Ser. No. 14/104,977), US 2014-0186843 A1 (U.S. application Ser. No. 14/104,900), US 2014-0179770 A1 (U.S. application Ser. No. 14/104,837) and US 2014-0179006 A1 (U.S. application Ser. No. 14/183,486), US 2014-0170753 (U.S. application Ser. No. 14/183,429); European Patent Applications EP 2 771 468 (EP13818570.7), EP 2 764 103 (EP13824232.6), and EP 2 784 162 (EP14170383.5); and PCT Patent Publications WO 2014/093661 (PCT/US2013/074743), WO 2014/093694 (PCT/US2013/074790), WO 2014/093595 (PCT/US2013/074611), WO 2014/093718 (PCT/US2013/074825), WO 2014/093709 (PCT/US2013/074812), WO 2014/093622 (PCT/US2013/074667), WO 2014/093635 (PCT/US2013/074691), WO 2014/093655 (PCT/US2013/074736), WO 2014/093712 (PCT/US2013/074819), WO 2014/093701 (PCT7US2013/074800), WO 2014/018423 (PCT/US2013/051418), WO 2014/204723 (PCT/US2014/041790), WO 2014/204724 (PCT/US2014/041800), WO 2014/204725 (PCT/US2014/041803), WO 2014/204726 (PCT US2014/041804), WO 2014/204727 (PCT US2014/041806), WO 2014/204728 (PCT/US2014/041808), and WO 2014/204729 (PCT US2014/041809). Reference is also made to U.S. provisional patent applications 61/758,468; 61/802,174; 61/806,375; 61/814,263; 61/819,803 and 61/828,130, filed on Jan. 30, 2013; Mar. 15, 2013; Mar. 28, 2013; Apr. 20, 2013; May 6, 2013 and May 28, 2013 respectively. Reference is also made to U.S. provisional patent application 61/836,123, filed on Jun. 17, 2013. Reference is additionally made to U.S. provisional patent applications 61/835,931, 61/835,936, 61/836,127, 61/836,101, 61/836,080 and 61/835,973, each filed Jun. 17, 2013. Further reference is made to U.S. provisional patent applications 61/862,468 and 61/862,355 filed on Aug. 5, 2013; 61/871,301 filed on Aug. 28, 2013; 61/960,777 filed on Sep. 25, 2013 and 61/961,980 filed on Oct. 28, 2013. Reference is yet further made to: PCT Patent applications Nos: PCT/US2014/041803, PCT/US2014/041800, PCT/US2014/041809, PCT/US2014/041804 and PCT US2014/041806, each filed Jun. 10, 2014 6/10/14; PCT US2014/041808 filed Jun. 11, 2014; and PCT/US2014/62558 filed Oct. 28, 2014, and U.S. Provisional Patent Applications Ser. Nos. 61/915,150, 61/915,301, 61/915,267 and 61/915,260, each filed Dec. 12, 2013; 61/757,972 and 61/768,959, filed on Jan. 29, 2013 and Feb. 25, 2013; 61/835,936, 61/836,127, 61/836,101, 61/836,080, 61/835,973, and 61/835,931, filed Jun. 17, 2013; 62/010,888 and 62/010,879, both filed Jun. 11, 2014; 62/010,329 and 62/010,441, each filed Jun. 10, 2014; 61/939,228 and 61/939,242, each filed Feb. 12, 2014; 61/980,012, filed Apr. 15, 2014; 62/038,358, filed Aug. 17, 2014; 62/054,490, 62/055,484, 62/055,460 and 62/055,487, each filed Sep. 25, 2014; and 62/069,243, filed Oct. 27, 2014. Reference is also made to U.S. provisional patent applications Nos. 62/055,484, 62/055,460, and 62/055,487, filed Sep. 25, 2014; U.S. provisional patent application 61/980,012, filed Apr. 15, 2014; and U.S. provisional patent application 61/939,242 filed Feb. 12, 2014. Reference is made to PCT application designating, inter alia, the United States, application No. PCT/US 14/41806, filed Jun. 10, 2014. Reference is made to U.S. provisional patent application 61/930,214 filed on Jan. 22, 2014. Reference is made to U.S. provisional patent applications 61/915,251, 61/915,260 and 61/915,267, each filed on Dec. 12, 2013. Reference is made to US provisional patent application U.S. Ser. No. 61/980,012 filed Apr. 15, 2014. Reference is made to PCT application designating, inter alia, the United States, application No. PCT/US 14/41806, filed Jun. 10, 2014. Reference is made to U.S. provisional patent application 61/930,214 filed on Jan. 22, 2014. Reference is made to U.S. provisional patent applications 61/915,251; 61/915,260 and 61/915,267, each filed on Dec. 12, 2013. [0054] Mention is also made of U.S. application 62/091,455, filed, 12 Dec. 2014, PROTECTED GUIDE RNAS (PGRNAS); U.S. application 62/096,708, 24 Dec. 2014, PROTECTED GUIDE RNAS (PGRNAS); U.S. application 62/091,462, 12 Dec. 2014, DEAD GUIDES FOR CRISPR TRANSCRIPTION FACTORS; U.S. application 62/096,324, 23 Dec. 2014, DEAD GUIDES FOR CRISPR TRANSCRIPTION FACTORS; U.S. application 62/091,456, 12 Dec. 2014, ESCORTED AND FUNCTIONALIZED GUIDES FOR CRISPR-CAS SYSTEMS; U.S. application 62/091,461, 12 Dec. 2014, DELIVERY, USE AND THERAPEUTIC APPLICATIONS OF THE CRISPR-CAS SYSTEMS AND COMPOSITIONS FOR GENOME EDITING AS TO HEMATOPOETIC STEM CELLS (HSCs); U.S. application 62/094,903, 19 Dec. 2014, UNBIASED IDENTIFICATION OF DOUBLE-STRAND BREAKS AND GENOMIC REARRANGEMENT BY GENOME-WISE INSERT CAPTURE SEQUENCING; U.S. application 62/096,761, 24 Dec. 2014, ENGINEERING OF SYSTEMS, METHODS AND OPTIMIZED ENZYME AND GUIDE SCAFFOLDS FOR SEQUENCE MANIPULATION; U.S. application 62/098,059, 30 Dec. 2014, RNA-TARGETING SYSTEM; U.S. application 62/096,656, 24 Dec. 2014, CRISPR HAVING OR ASSOCIATED WITH DESTABILIZATION DOMAINS; U.S. application 62/096,697, 24 Dec. 2014, CRISPR HAVING OR ASSOCIATED WITH AAV; U.S. application 62/098,158, 30 Dec. 2014, ENGINEERED CRISPR COMPLEX INSERTIONAL TARGETING SYSTEMS; U.S. application 62/151,052, 22 Apr. 2015, CELLULAR TARGETING FOR EXTRACELLULAR EXOSOMAL REPORTING; U.S. application 62/054,490, 24 Sep. 2014, DELIVERY, USE AND THERAPEUTIC APPLICATIONS OF THE CRISPR-CAS SYSTEMS AND COMPOSITIONS FOR TARGETING DISORDERS AND DISEASES USING PARTICLE DELIVERY COMPONENTS; U.S. application 62/055,484, 25 Sep. 2014, SYSTEMS, METHODS AND COMPOSITIONS FOR SEQUENCE MANIPULATION WITH OPTIMIZED FUNCTIONAL CRISPR-CAS SYSTEMS; U.S. application 62/087,537, 4 Dec. 2014, SYSTEMS, METHODS AND COMPOSITIONS FOR SEQUENCE MANIPULATION WITH OPTIMIZED FUNCTIONAL CRISPR-CAS SYSTEMS; U.S. application 62/054,651, 24 Sep. 2014, DELIVERY, USE AND THERAPEUTIC APPLICATIONS OF THE CRISPR-CAS SYSTEMS AND COMPOSITIONS FOR MODELING COMPETITION OF MULTIPLE CANCER MUTATIONS IN VIVO; U.S. application 62/067,886, 23 Oct. 2014, DELIVERY, USE AND THERAPEUTIC APPLICATIONS OF THE CRISPR-CAS SYSTEMS AND COMPOSITIONS FOR MODELING COMPETITION OF MULTIPLE CANCER MUTATIONS IN VIVO; U.S. application 62/054,675, 24 Sep. 2014, DELIVERY, USE AND THERAPEUTIC APPLICATIONS OF THE CRISPR-CAS SYSTEMS AND COMPOSITIONS IN NEURONAL CELLS/TISSUES; U.S. application 62/054,528, 24 Sep. 2014, DELIVERY, USE AND THERAPEUTIC APPLICATIONS OF THE CRISPR-CAS SYSTEMS AND COMPOSITIONS IN IMMUNE DISEASES OR DISORDERS; U.S. application 62/055,454, 25 Sep. 2014, DELIVERY, USE AND THERAPEUTIC APPLICATIONS OF THE CRISPR-CAS SYSTEMS AND COMPOSITIONS FOR TARGETING DISORDERS AND DISEASES USING CELL PENETRATION PEPTIDES (CPP); U.S. application 62/055,460, 25 Sep. 2014, MULTIFUNCTIONAL-CRISPR COMPLEXES AND/OR OPTIMIZED ENZYME LINKED FUNCTION AL-CRISPR COMPLEXES; U.S. application 62/087,475, 4 Dec. 2014, FUNCTIONAL SCREENING WITH OPTIMIZED FUNCTIONAL CRISPR-CAS SYSTEMS; U.S. application 62/055,487, 25 Sep. 2014, FUNCTIONAL SCREENING WITH OPTIMIZED FUNCTIONAL CRISPR-CAS SYSTEMS; U.S. application 62/087,546, 4 Dec. 2014, MULTIFUNCTIONAL CRISPR COMPLEXES AND/OR OPTIMIZED ENZYME LINKED FUNCTIONAL-CRISPR COMPLEXES; and U.S. application 62/098,285, 30 Dec. 2014, CRISPR MEDIATED IN VIVO MODELING AND GENETIC SCREENING OF TUMOR GROWTH AND METASTASIS.

[0398] Each of these patents, patent publications, and applications, and all documents cited therein or during their prosecution (“appin cited documents”) and all documents cited or referenced in the appin cited documents, together with any instructions, descriptions, product specifications, and product sheets for any products mentioned therein or in any document therein and incorporated by reference herein, are hereby incorporated herein by reference, and may be employed in the practice of the invention. All documents (e.g., these patents, patent publications and applications and the appin cited documents) are incorporated herein by reference to the same extent as if each individual document was specifically and individually indicated to be incorporated by reference.

[0399] Also with respect to general information on CRISPR-Cas Systems, mention is made of the following (also hereby incorporated herein by reference):

[0400] Multiplex genome engineering using CRISPR/Cas systems, Cong, L., Ran, F. A., Cox, D., Lin, S., Barretto, R., Habib, N., Hsu, P. D., Wu, X., Jiang, W., Marraffini, L. A., & Zhang, F. Science February 15; 339(6121):819-23 (2013); RNA-gided editing of bacterial genomes using CRISPR-Cas systems. Jiang W., Bikard D., Cox D., Zhang F, Marraffini L A. Nat Biotechnol March; 31(3):233-9 (2013); One-Step Generation of Mice Carrying Mutations in Multiple Genes by CRISPR/Cas-Mediated Genome Engineering. Wang H., Yang H., Shivalila C S., Dawlaty M M., Cheng A W., Zhang F., Jaenisch R. Cell May 9; 153(4):910-8 (2013); Optical control of mammalian endogenous transcription and epigenetic states. Konermann S, Brigham M D, Trevino A E, Hsu P D, Heidenreich M, Cong L, Piatt R J, Scott D A, Church G M, Zhang F. Nature. 2013 Aug. 22; 500(7463):472-6. doi: 10.1038/Nature 12466. Epub 2013 Aug. 23;

[0401] Double Nicking by RNA-Guided CRISPR Cas9 for Enhanced Genome Editing Specificity. Ran, F A., Hsu, PD., Lin, C Y., Gootenberg, J S., Konermann, S., Trevino, A E, Scott, DA., Inoue, A., Matoba, S., Zhang, Y, & Zhang, F. Cell August 28. pii: 50092-8674(13)01015-5. (2013

[0402] DNA targeting specificity of RNA-guided Cas9 nucleases. Hsu, P., Scott, D., Weinstein, J., Ran, FA., Konermann, S., Agarwala, V., Li, Y., Fine, E., Wu, X., Shalem, O., Cradick, Ti., Marraffini, L A., Bao, G., & Zhang, F. Nat Biotechnol doi:10.1038/nbt.2647 (2013);

[0403] Genome engineering using the CRISPR-Cas9 system. Ran, FA., Hsu, PD., Wright, J., Agarwala, V., Scott, DA., Zhang, F. Nature Protocols November; 8(II):2281-308. (2013); Genome-Scale CRISPR-Cas9 Knockout Screening in Human Cells. Shalem, O., Sanjana, N E., Hartenian, E., Shi, X., Scott, DA., Mikkelson, T., Heckl, D., Ebert, B L., Root, D E., Doench, J G., Zhang, F. Science Dec. 12. (2013). [Epub ahead of print]; Crystal structure of cas9 in complex with guide RNA and target DNA. Nishimasu, H., Ran, FA., Hsu, PD., Konermann, S., Shehata, SI., Dohmae, N., Ishitani, R., Zhang, F., Nureki, O. Cell Feb. 27. (2014). 156(5):935-49;

[0404] Genome-wide binding of the CRISPR endonuclease Cas9 in mammalian cells. Wu X., Scott D A., Kriz A J., Chiu A C, Hsu P D., Dadon D B., Cheng A W., Trevino A E., Konermann S., Chen S., Jaenisch R., Zhang F., Sharp P A. Nat Biotechnol. (2014) April 20. doi: 10.1038/nbt.2889,

[0405] CRISPR-Cas9 Knockin Mice for Genome Editing and Cancer Modeling, Piatt et al., Cell 159(2): 440-455 (2014) DOI: 10.1016/j.cell.2014.09.014,

[0406] Development and Applications of CRISPR-Cas9 for Genome Engineering, Hsu et al. Cell 157, 1262-1278 (Jun. 5, 2014) (Hsu 2014),

[0407] Genetic screens in human cells using the CRISPR/Cas9 system, Wang et al., Science. 2014 Jan. 3; 343(6166): 80-84. doi: 10.1126/science.1246981,

[0408] Rational design of highly active sgRNAs for CRISPR-Cas9-mediated gene inactivation, Doench et al., Nature Biotechnology published online 3 Sep. 2014; doi: 10.1038/nbt.3026, and In vivo interrogation of gene function in the mammalian brain using CRISPR-Cas9, Swiech et al, Nature Biotechnology; published online 19 Oct. 2014; doi:10.1038/nbt.3055.

[0409] Genome-scale transcriptional activation by an engineered CRISPR-Cas9 complex, onermann S, Brigham M D, Trevino A E, Joung J, Abudayyeh 00, Barcena C, Hsu P D, Habib N, Gootenberg J S, Nishimasu H, Nureki O, Zhang F., Nature. January 29; 517(7536):583-8 (2015).

[0410] A split-Cas9 architecture for inducible genome editing and transcription modulation, Zetsche B, Volz S E, Zhang F., (published online 2 Feb. 2015) Nat Biotechnol. Feb; 33(2): 139-42 (2015);

[0411] Genome-wide CRISPR Screen in a Mouse Model of Tumor Growth and Metastasis, Chen S, Sanjana N E, Zheng, Shalem O, Lee, Shi X, Scott D A, Song J, Pan J Q, Weissleder R, Lee H, Zhang F, Sharp P A. Cell 160, 1246-1260, Mar. 12, 2015 (multiplex screen in mouse), and

[0412] In vivo genome editing using Staphylococcus aureus Cas9, Ran F A, Cong L, Yan W X, Scott D A, Gootenberg J S, Kriz A J, Zetsche B, Shalem O, Wu X, Makarova K S, oonin E V, Sharp P A, Zhang F., (published online 1 Apr. 2015), Nature. April 9; 520(7546): 186-91 (2015).

[0413] High-throughput functional genomics using CRISPR-Cas9, Shalem et al, Nature Reviews Genetics 16, 299-311 (May 2015).

[0414] Sequence determinants of improved CRISPR sgRNA design, Xu et al., Genome Research 25, 1 147-1 157 (August 2015).

[0415] A Genome-wide CRISPR Screen in Primary Immune Cells to Dissect Regulatory Networks, Parnas et al., Cell 162, 675-686 (Jul. 30, 2015).

[0416] CRISPR/Cas9 cleavage of viral DNA efficiently suppresses hepatitis B virus, Ramanan et al., Scientific Reports 5:10833. doi: 10.1038/srep10833 (Jun. 2, 2015).

[0417] Crystal Structure of Staphylococcus aureus Cas9, Nishimasu et al., Cell 162, 1113-1126 (Aug. 27, 2015).

[0418] BCL11 A enhancer dissection by Cas9-mediated in situ saturating mutagenesis, Canver et al., Nature 527(7577): 192-7 (Nov. 12, 2015) doi: 10.1038/nature| 5521. Epub 2015 Sep. 16. each of which is incorporated herein by reference, and discussed briefly below:

[0419] Cong et al. engineered type II CRISPR/Cas systems for use in eukaryotic cells based on both Streptococcus thermophilus Cas9 and also Streptoccocus pyogenes Cas9 and demonstrated that Cas9 nucleases can be directed by short RNAs to induce precise cleavage of DNA in human and mouse cells. Their study further showed that Cas9 as converted into a nicking enzyme can be used to facilitate homology-directed repair in eukaryotic cells with minimal mutagenic activity. Additionally, their study demonstrated that multiple guide sequences can be encoded into a single CRISPR array to enable simultaneous editing of several at endogenous genomic loci sites within the mammalian genome, demonstrating easy programmability and wide applicability of the RNA-guided nuclease technology. This ability to use RNA to program sequence specific DNA cleavage in cells defined a new class of genome engineering tools. These studies further showed that other CRISPR loci are likely to be transplantable into mammalian cells and can also mediate mammalian genome cleavage. Importantly, it can be envisaged that several aspects of the CRISPR/Cas system can be further improved to increase its efficiency and versatility.

[0420] Jiang et al. used the clustered, regularly interspaced, short palindromic repeats (CRISPR)-associated Cas9 endonuclease complexed with dual-RNAs to introduce precise mutations in the genomes of Streptococcus pneumoniae and Escherichia coli. The approach relied on dual-RNA:Cas9-directed cleavage at the targeted genomic site to kill unmutated cells and circumvents the need for selectable markers or counter-selection systems, The study reported reprogramming dual-RNA:Cas9 specificity by changing the sequence of short CRISPR RNA (crRNA) to make single- and multinucleotide changes carried on editing templates. The study showed that simultaneous use of two crRNAs enabled multiplex mutagenesis. Furthermore, when the approach was used in combination with recombineering, in S. pneumoniae, nearly 100% of cells that were recovered using the described approach contained the desired mutation, and in E. coli, 65% that were recovered contained the mutation.

[0421] Wang et al. (2013) used the CRISPR/Cas system for the one-step generation of mice carrying mutations in multiple genes which were traditionally generated in multiple steps by sequential recombination in embryonic stem cells and/or time-consuming intercrossing of mice with a single mutation. The CRISPR/Cas system will greatly accelerate the in vivo study of functionally redundant genes and of epistatic gene interactions.

[0422] Konermann et al. addressed the need in the art for versatile and robust technologies that enable optical and chemical modulation of DNA-binding domains based CRISPR Cas9 enzyme and also Transcriptional Activator Like Effectors.

[0423] Ran et al. (2013-A) described an approach that combined a Cas9 nickase mutant with paired guide RNAs to introduce targeted double-strand breaks. This addresses the issue of the Cas9 nuclease from the microbial CRISPR-Cas system being targeted to specific genomic loci by a guide sequence, which can tolerate certain mismatches to the DNA target and thereby promote undesired off-target mutagenesis. Because individual nicks in the genome are repaired with high fidelity, simultaneous nicking via appropriately offset guide RNAs is required for double-stranded breaks and extends the number of specifically recognized bases for target cleavage. The authors demonstrated that using paired nicking can reduce off-target activity by 50- to 1,500-fold in cell lines and to facilitate gene knockout in mouse zygotes without sacrificing on-target cleavage efficiency. This versatile strategy enables a wide variety of genome editing applications that require high specificity. Hsu et al. (2013) characterized SpCas9 targeting specificity in human cells to inform the selection of target sites and avoid off-target effects. The study evaluated >700 guide RNA variants and SpCas9-induced indel mutation levels at >100 predicted genomic off-target loci in 293T and 293FT cells. The authors that SpCas9 tolerates mismatches between guide RNA and target DNA at different positions in a sequence-dependent manner, sensitive to the number, position and distribution of mismatches. The authors further showed that SpCas9-mediated cleavage is unaffected by DNA methylation and that the dosage of SpCas9 and sgRNA can be titrated to minimize off-target modification. Additionally, to facilitate mammalian genome engineering applications, the authors reported providing a web-based software tool to guide the selection and validation of target sequences as well as off-target analyses.

[0424] Ran et al. (2013-B) described a set of tools for Cas9-mediated genome editing via non-homologous end joining (NHEJ) or homology-directed repair (HDR) in mammalian cells, as well as generation of modified cell lines for downstream functional studies. To minimize off-target cleavage, the authors further described a double-nicking strategy using the Cas9 nickase mutant with paired guide RNAs. The protocol provided by the authors experimentally derived guidelines for the selection of target sites, evaluation of cleavage efficiency and analysis of off-target activity. The studies showed that beginning with target design, gene modifications can be achieved within as little as 1-2 weeks, and modified clonal cell lines can be derived within 2-3 weeks.

[0425] Shaiem et al. described a new way to interrogate gene function on a genome-wide scale. Their studies showed that delivery of a genome-scale CRISPR-Cas9 knockout (GeC O) library targeted 18,080 genes with 64,751 unique guide sequences enabled both negative and positive selection screening in human cells. First, the authors showed use of the GeCKO library to identify genes essential for cell viability in cancer and pluripotent stem cells. Next, in a melanoma model, the authors screened for genes whose loss is involved in resistance to vemurafenib, a therapeutic that inhibits mutant protein kinase BRAF. Their studies showed that the highest-ranking candidates included previously validated genes NF1 and MED 12 as well as novel hits NF2, CUL3, TADA2B, and TADAL The authors observed a high level of consistency between independent guide RNAs targeting the same gene and a high rate of hit confirmation, and thus demonstrated the promise of genome-scale screening with Cas9.

[0426] Nishimasu et al. reported the crystal structure of Streptococcus pyogenes Cas9 in complex with sgRNA and its target DNA at 2.5 A° resolution. The structure revealed a bilobed architecture composed of target recognition and nuclease lobes, accommodating the sgRNA:DNA heteroduplex in a positively charged groove at their interface. Whereas the recognition lobe is essential for binding sgRNA and DNA, the nuclease lobe contains the HNH and RuvC nuclease domains, which are properly positioned for cleavage of the complementary and non-complementary strands of the target DNA, respectively. The nuclease lobe also contains a carboxyl-terminal domain responsible for the interaction with the protospacer adjacent motif (PAM). This high-resolution structure and accompanying functional analyses have revealed the molecular mechanism of RNA-guided DNA targeting by Cas9, thus paving the way for the rational design of new, versatile genome-editing technologies.

[0427] Wu et al. mapped genome-wide binding sites of a catalytically inactive Cas9 (dCas9) from Streptococcus pyogenes loaded with single guide RNAs (sgRNAs) in mouse embryonic stem cells (mESCs). The authors showed that each of the four sgRNAs tested targets dCas9 to between tens and thousands of genomic sites, frequently characterized by a 5-nucleotide seed region in the sgRNA and an NGG protospacer adjacent motif (PAM). Chromatin inaccessibility decreases dCas9 binding to other sites with matching seed sequences; thus 70% of off-target sites are associated with genes. The authors showed that targeted sequencing of 295 dCas9 binding sites in mESCs transfected with catalytically active Cas9 identified only one site mutated above background levels. The authors proposed a two-state model for Cas9 binding and cleavage, in which a seed match triggers binding but extensive pairing with target DNA is required for cleavage.

[0428] Piatt et al. established a Cre-dependent Cas9 knockin mouse. The authors demonstrated in vivo as well as ex vivo genome editing using adeno-associated virus (AAV)-, lentivirus-, or particle-mediated delivery of guide RNA in neurons, immune cells, and endothelial cells.

[0429] Hsu et al. (2014) is a review article that discusses generally CRISPR-Cas9 history from yogurt to genome editing, including genetic screening of cells.

[0430] Wang et al, (2014) relates to a pooled, loss-of-function genetic screening approach suitable for both positive and negative selection that uses a genome-scale lentiviral single guide RNA (sgRNA) library.

[0431] Doench et al. created a pool of sgRNAs, tiling across all possible target sites of a panel of six endogenous mouse and three endogenous human genes and quantitatively assessed their ability to produce null alleles of their target gene by antibody staining and flow cytometry. The authors showed that optimization of the PAM improved activity and also provided an on-line tool for designing sgRNAs.

[0432] Swiech et al. demonstrate that AAV-mediated SpCas9 genome editing can enable reverse genetic studies of gene function in the brain.

[0433] Konermann et al. (2015) discusses the ability to attach multiple effector domains, e.g., transcriptional activator, functional and epigenomic regulators at appropriate positions on the guide such as stem or tetraloop with and without linkers.

[0434] Zetsche et al. demonstrates that the Cas9 enzyme can be split into two and hence the assembly of Cas9 for activation can be controlled.

[0435] Chen et al relates to multiplex screening by demonstrating that a genome-wide in vivo CRISPR-Cas9 screen in mice reveals genes regulating lung metastasis. >Ran et al. (2015) relates to SaCas9 and its ability to edit genomes and demonstrates that one cannot extrapolate from biochemical assays. Shalem et al. (2015) described ways in which catalytically inactive Cas9 (dCas9) fusions are used to synthetically repress (CRISPRi) or activate (CRISPRa) expression, showing, advances using Cas9 for genome-scale screens, including arrayed and pooled screens, knockout approaches that inactivate genomic loci and strategies that modulate transcriptional activity.

[0436] Shalem et al. (2015) described ways in which catalytically inactive Cas9 (dCas9) fusions are used to synthetically repress (CRISPRi) or activate (CRISPRa) expression, showing, advances using Cas9 for genome-scale screens, including arrayed and pooled screens, knockout approaches that inactivate genomic loci and strategies that modulate transcriptional activity.

[0437] Xu et al. (2015) assessed the DNA sequence features that contribute to single guide RNA (sgRNA) efficiency in CRISPR-based screens. The authors explored efficiency of CRISPR/Cas9 knockout and nucleotide preference at the cleavage site. The authors also found that the sequence preference for CRISPRi/a is substantially different from that for CRISPR Cas9 knockout.

[0438] Parnas et al. (2015) introduced genome-wide pooled CRISPR-Cas9 libraries into dendritic cells (DCs) to identify genes that control the induction of tumor necrosis factor (Tnf) by bacterial lipopolysaccharide (LPS). Known regulators of Tlr4 signaling and previously unknown candidates were identified and classified into three functional modules with distinct effects on the canonical responses to LPS.

[0439] Ramanan et al (2015) demonstrated cleavage of viral episomal DNA (cccDNA) in infected cells. The HBV genome exists in the nuclei of infected hepatocytes as a 3.2 kb double-stranded episomal DNA species called covalently closed circular DNA (cccDNA), which is a key component in the HBV life cycle whose replication is not inhibited by current therapies. The authors showed that sgRNAs specifically targeting highly conserved regions of HBV robustly suppresses viral replication and depleted cccDNA. Nishimasu et al. (2015) reported the crystal structures of SaCas9 in complex with a single guide RNA (sgRNA) and its double-stranded DNA targets, containing the 5′-TTGAAT-3′ PAM and the 5′-TTGGGT-3′ PAM. A structural comparison of SaCas9 with SpCas9 highlighted both structural conservation and divergence, explaining their distinct PAM specificities and orthologous sgRNA recognition.

[0440] Slaymaker et al (2015) reported the use of structure-guided protein engineering to improve the specificity of Streptococcus pyogenes Cas9 (SpCas9). The authors developed “enhanced specificity” SpCas9 (eSpCas9) variants which maintained robust on-target cleavage with reduced off-target effects.

[0441] Tsai et al, “Dimeric CRISPR A-guided FokI nucleases for highly specific genome editing,” Nature Biotechnology 32(6): 569-77 (2014) which is not believed to be prior art to the instant invention or application, but which may be considered in the practice of the instant invention. Mention is also made of Konermann et al., “Genome-scale transcription activation by an engineered CRISPR-Cas9 complex,” doi:10.1038/nature|4136, incorporated herein by reference.

[0442] In general, the CRISPR-Cas or CRISPR system is as used in the foregoing documents, such as WO 2014/093622 (PCT/US2013/074667) and refers collectively to transcripts and other elements involved in the expression of or directing the activity of CRISPR-associated (Cas) genes, including sequences encoding a Cas gene, a tracr (trans-activating CRISPR) sequence (e.g. tracrRNA or an active partial tracrRNA), a tracr-mate sequence (encompassing a direct repeat and a tracrRNA-processed partial direct repeat in the context of an endogenous CRISPR system), a guide sequence (also referred to as a spacer in the context of an endogenous CRISPR system), or gRNA(s) as that term is herein used (including, e.g., single guide RNA (sgRNA) (chimeric RNA) and dual guide RNAs (dgRNAs)). In the context CRISPR systems a, “target sequence” refers to a sequence to which the targeting domain sequence of a gRNA molecule is designed to have complementarity, where hybridization between a target sequence and a targeting domain sequence of a gRNA directs the CRISPR system to the locus comprising the target sequence. A target sequence may comprise any polynucleotide, such as DNA or RNA polynucleotides. In some embodiments, a target sequence is located in the nucleus or cytoplasm of a cell. In some embodiments, direct repeats may be identified in silico by searching for repetitive motifs that fulfill any or all of the following criteria: 1. found in a 2 Kb window of genomic sequence flanking the type II CRISPR locus; 2. span from 20 to 50 bp; and 3. interspaced by 20 to 50 bp. In some embodiments, 2 of these criteria may be used, for instance 1 and 2, 2 and 3, or 1 and 3. In some embodiments, all 3 criteria may be used. In some embodiments it may be preferred in a CRISPR system that the tracr sequence has one or more hairpins and is 30 or more nucleotides in length, 40 or more nucleotides in length, or 50 or more nucleotides in length; the guide sequence is between 10 to 30 nucleotides in length, the CRISPR/Cas enzyme is a Type II Cas9 enzyme. In embodiments of the invention the terms guide sequence and guide RNA are used interchangeably as in foregoing cited documents such as WO 2014/093622 (PCT US2013/074667). In general, a guide sequence is any polynucleotide sequence having sufficient complementarity with a target sequence to hybridize with the target sequence and direct sequence-specific binding of a CRISPR system to the target sequence. In some embodiments, the degree of complementarity between a guide sequence and its corresponding target sequence, when optimally aligned using a suitable alignment algorithm, is about or more than about 50%, 60%, 75%, 80%, 85%, 90%, 95%, 97.5%, 99%, or more. Optimal alignment may be determined with the use of any suitable algorithm for aligning sequences, non-limiting example of which include the Smith-Waterman algorithm, the Needleman-Wunsch algorithm, algorithms based on the Burrows-Wheeler Transform (e.g. the Burrows Wheeler Aligner), ClustalW, Clustal X, BLAT, Novoalign (Novocraft Technologies; available at www.novocraft.com), ELAND (Illumina, San Diego, Calif.), SOAP (available at soap.genomics.org.cn), and aq (available at maq.sourceforge.net). In some embodiments, a guide sequence is about or more than about 5, 10, 11, 12, 13, 14, 15, 16, 17, 18, 19, 20, 21, 22, 23, 24, 25, 26, 27, 28, 29, 30, 35, 40, 45, 50, 75, or more nucleotides in length. In some embodiments, a guide sequence is less than about 75, 50, 45, 40, 35, 30, 25, 20, 15, 12, or fewer nucleotides in length. Preferably the guide sequence is 10-30 nucleotides long. The ability of a guide sequence to direct sequence-specific binding of a CRISPR system to a target sequence may be assessed by any suitable assay. For example, the components of a CRISPR system sufficient to form a CRISPR system, including the guide sequence to be tested, may be provided to a host cell having the corresponding target sequence, such as by transfection with vectors encoding the components of the CRISPR sequence, followed by an assessment of preferential cleavage within the target sequence, such as by Surveyor assay as described in the literature and known to those skilled in the art. Similarly, cleavage of a target polynucleotide sequence may be evaluated in a test tube by providing the target sequence, components of a CRISPR system, including the guide sequence to be tested and a control guide sequence different from the test guide sequence, and comparing binding or rate of cleavage at the target sequence between the test and control guide sequence reactions. Other assays are possible, and will occur to those skilled in the art. A guide sequence may be selected to target any target sequence. In some embodiments, the target sequence is a sequence within a genome of a cell. Exemplary target sequences include those that are unique in the target genome. For example, for the S. pyogenes Cas9, a unique sequence in a genome may include a Cas9 target sequence of the form NNNNNNNNNNNNNNNNNNNNXGG (where N is A, G, T, or C; and X can be anything), wherein the sequence has a single occurrence in the genome. For the S. thermophilus CRISPR/Cas9 system, a unique sequence in a genome may include a Cas9 target site of the form NNNNNNNNNNNNNNNNNNNNXXAGAAW (SEQ ID NO: 863) (where N is A, G, T, or C; X can be anything; and W is A or T), wherein the sequence has a single occurrence in the genome. For the S. pyogenes Cas9 or the S. Thermophilius Cas9, a unique sequence in a genome may include a Cas9 target site of the form NNNNNNNNNNNNNNNNNNNNXGGXG (where N is A, G, T, or C; and X can be anything), wherein the sequence has a single occurrence in the genome. In some embodiments, a guide RNA sequence is selected to reduce the degree secondary structure within the guide RNA sequence. In some embodiments, about or less than about 75%, 50%, 40%, 30%, 25%, 20%, 15%, 10%, 5%, 1%, or fewer of the nucleotides of the guide sequence participate in self-complementary base pairing when optimally folded. Optimal folding may be determined by any suitable polynucleotide folding algorithm. Some programs are based on calculating the minimal Gibbs free energy. An example of one such algorithm is mFold, as described by Zuker and Stiegler (Nucleic Acids Res. 9 (1981), 133-148). Another example folding algorithm is the online webserver RNAfold, developed at Institute for Theoretical Chemistry at the University of Vienna, using the centroid structure prediction algorithm (see e.g. A. R. Gruber et al., 2008, Cell 106(1): 23-24; and PA Carr and GM Church, 2009, Nature Biotechnology 27(12): 1 151-62).

[0443] In some embodiments, the RNA-guided nuclease is a Cas molecule, e.g., a Cas9 molecule. Cas9 molecules of a variety of species can be used in the methods and compositions described herein. In preferred embodiments, the Cas9 molecule is a S. pyogenes Cas9 molecule. In embodiments, the Cas9 molecule is derived from a S. pyogenes Cas9 molecule (e.g., UniProt Q99ZW2). While the S. pyogenes Cas9 molecule are the subject of much of the disclosure herein, Cas9 molecules of, derived from, or based on the Cas9 proteins of other species listed herein can be used as well. In other words, other Cas9 molecules, e.g., S. thermophilus, Staphylococcus aureus and/or Neisseria meningitidis Cas9 molecules, may be used in the systems, methods and compositions described herein. Additional Cas9 species include: Acidovorax avenae, Actinobacillus pleuropneumoniae, Actinobacillus succinogenes, Actinobacillus suis, Actinomyces sp., cycliphilus denitrificans, Aminomonas paucivorans, Bacillus cereus, Bacillus smithii, Bacillus thuringiensis, Bacteroides sp., Blastopirellula marina, Bradyrhiz obium sp., Brevibacillus latemsporus, Campylobacter coli, Campylobacter jejuni, Campylobacter lad, Candidatus Puniceispirillum, Clostridiu cellulolyticum, Clostridium perfringens, Corynebacterium accolens, Corynebacterium diphtheria, Corynebacterium matruchotii, Dinoroseobacter sliibae, Eubacterium dolichum, gamma proteobacterium, Gluconacetobacler diazotrophicus, Haemophilus parainfluenzae, Haemophilus sputorum, Helicobacter canadensis, Helicobacter cinaedi, Helicobacter mustelae, Ilyobacler polytropus, Kingella kingae, Lactobacillus crispatus, Listeria ivanovii, Listeria monocytogenes, Listeriaceae bacterium, Methylocystis sp., Methylosinus trichosporium, Mobiluncus mulieris, Neisseria bacilliformis, Neisseria cinerea, Neisseria flavescens, Neisseria lactamica. Neisseria sp., Neisseria wadsworthii, Nitrosomonas sp., Parvibaculum lavamentivorans, Pasteurella multocida, Phascolarctobacterium succinatutens, Ralstonia syzygii, Rhodopseudomonas palustris, Rhodovulum sp., Simonsiella muelleri, Sphingomonas sp., Sporolactobacillus vineae, Staphylococcus lugdunensis, Streptococcus sp., Subdoligranulum sp., Tislrella mobilis, Treponema sp., or Verminephrobacter eiseniae.

[0444] A Cas9 molecule, as that term is used herein, refers to a molecule that can interact with a gRNA molecule (e.g., sequence of a domain of a tracr) and, in concert with the gRNA molecule, localize (e.g., target or home) to a site which comprises a target sequence and PAM sequence.

[0445] In embodiments, the ability of an active Cas9 molecule to interact with and cleave a target nucleic acid is PAM sequence dependent. A PAM sequence is a sequence in the target nucleic acid. In an embodiment, cleavage of the target nucleic acid occurs upstream from the PAM sequence. Active Cas9 molecules from different bacterial species can recognize different sequence motifs (e.g., PAM sequences). In an embodiment, an active Cas9 molecule of S. pyogenes recognizes the sequence motif NGG and directs cleavage of a target nucleic acid sequence 1 to 10, e.g., 3 to 5, base pairs upstream from that sequence. See, e.g., Mali el al, SCIENCE 2013; 339(6121): 823-826. In an embodiment, an active Cas9 molecule of S. thermophilus recognizes the sequence motif NGGNG and NNAGAAW (W=A or T) and directs cleavage of a core target nucleic acid sequence 1 to 10, e.g., 3 to 5, base pairs upstream from these sequences. See, e.g., Horvath et al., SCIENCE 2010; 327(5962): 167-170, and Deveau et al, J BACTERIOL 2008; 190(4): 1390-1400. In an embodiment, an active Cas9 molecule of S. mutans recognizes the sequence motif NGG or NAAR (R-A or G) and directs cleavage of a core target nucleic acid sequence 1 to 10, e.g., 3 to 5 base pairs, upstream from this sequence. See, e.g., Deveau et al., J BACTERIOL 2008; 190(4): 1390-1400.

[0446] In an embodiment, an active Cas9 molecule of S. aureus recognizes the sequence motif NNGRR (R=A or G) and directs cleavage of a target nucleic acid sequence 1 to 10, e.g., 3 to 5, base pairs upstream from that sequence. See, e.g., Ran F. et al., NATURE, vol. 520, 2015, pp. 186-191. In an embodiment, an active Cas9 molecule of N. meningitidis recognizes the sequence motif NNNNGATT and directs cleavage of a target nucleic acid sequence 1 to 10, e.g., 3 to 5, base pairs upstream from that sequence. See, e.g., Hou et al., PNAS EARLY EDITION 2013, 1-6. The ability of a Cas9 molecule to recognize a PAM sequence can be determined, e.g., using a transformation assay described in Jinek et al, SCIENCE 2012, 337:816.

[0447] Exemplary naturally occurring Cas9 molecules are described in Chylinski et al, RNA Biology 2013; 10:5, 727-737. Such Cas9 molecules include Cas9 molecules of a cluster 1 bacterial family, cluster 2 bacterial family, cluster 3 bacterial family, cluster 4 bacterial family, cluster 5 bacterial family, cluster 6 bacterial family, a cluster 7 bacterial family, a cluster 8 bacterial family, a cluster 9 bacterial family, a cluster 10 bacterial family, a cluster 11 bacterial family, a cluster 12 bacterial family, a cluster 13 bacterial family, a cluster 14 bacterial family, a cluster 1 bacterial family, a cluster 16 bacterial family, a cluster 17 bacterial family, a cluster 18 bacterial family, a cluster 19 bacterial family, a cluster 20 bacterial family, a cluster 21 bacterial family, a cluster 22 bacterial family, a cluster 23 bacterial family, a cluster 24 bacterial family, a cluster 25 bacterial family, a cluster 26 bacterial family, a cluster 27 bacterial family, a cluster 28 bacterial family, a cluster 29 bacterial family, a cluster 30 bacterial family, a cluster 31 bacterial family, a cluster 32 bacterial family, a cluster 33 bacterial family, a cluster 34 bacterial family, a cluster 35 bacterial family, a cluster 36 bacterial family, a cluster 37 bacterial family, a cluster 38 bacterial family, a cluster 39 bacterial family, a cluster 40 bacterial family, a cluster 41 bacterial family, a cluster 42 bacterial family, a cluster 43 bacterial family, a cluster 44 bacterial family, a cluster 45 bacterial family, a cluster 46 bacterial family, a cluster 47 bacterial family, a cluster 48 bacterial family, a cluster 49 bacterial family, a cluster 50 bacterial family, a cluster 51 bacterial family, a cluster 52 bacterial family, a cluster 53 bacterial family, a cluster 54 bacterial family, a cluster 55 bacterial family, a cluster 56 bacterial family, a cluster 57 bacterial family, a cluster 58 bacterial family, a cluster 59 bacterial family, a cluster 60 bacterial family, a cluster 61 bacterial family, a cluster 62 bacterial family, a cluster 63 bacterial family, a cluster 64 bacterial family, a cluster 65 bacterial family, a cluster 66 bacterial family, a cluster 67 bacterial family, a cluster 68 bacterial family, a cluster 69 bacterial family, a cluster 70 bacterial family, a cluster 71 bacterial family, a cluster 72 bacterial family, a cluster 73 bacterial family, a cluster 74 bacterial family, a cluster 75 bacterial family, a cluster 76 bacterial family, a cluster 77 bacterial family, or a cluster 78 bacterial family.

[0448] Exemplary naturally occurring Cas9 molecules include a Cas9 molecule of a cluster 1 bacterial family. Examples include a Cas9 molecule of: S. pyogenes (e.g., strain SF370, MGAS 10270, MGAS 10750, MGAS2096, MGAS315, MGAS5005, MGAS6180, MGAS9429, NZ131 and SSI-1), S. thermophilus (e.g., strain LMD-9), S. pseudoporcinus (e.g., strain SPIN 20026), S. mutans (e.g., strain UA 159, NN2025), S. macacae (e.g., strain NCTC1 1558), S. gallolylicus (e.g., strain UCN34, ATCC BAA-2069), S. equines (e.g., strain ATCC 9812, MGCS 124), S. dysdalactiae (e.g., strain GGS 124), S. bovis (e.g., strain ATCC 700338), S. cmginosus (e.g.; strain F021 1), S. agalactia* (e.g., strain NEM316, A909), Listeria monocytogenes (e.g., strain F6854), Listeria innocua (L. innocua, e.g., strain Clip 11262), EtUerococcus italicus (e.g., strain DSM 15952), or Enterococcus faecium (e.g., strain 1,23,408). Additional exemplary Cas9 molecules are a Cas9 molecule of Neisseria meningitidis (Hou et al. PNAS Early Edition 2013, 1-6) and a S. aureus Cas9 molecule.

[0449] In an embodiment, a Cas9 molecule, e.g., an active Cas9 molecule or inactive Cas9 molecule, comprises an amino acid sequence: having 60%, 65%, 70%, 75%, 80%, 85%, 90%, 95%, 96%, 97%, 98%, or 99% homology with; differs at no more than 1%, 2%, 5%, 10%, 15%, 20%, 30%, or 40% of the amino acid residues when compared with; differs by at least 1, 2, 5, 10 or 20 amino acids but by no more than 100, 80, 70, 60, 50, 40 or 30 amino acids from; or is identical to; any Cas9 molecule sequence described herein or a naturally occurring Cas9 molecule sequence, e.g., a Cas9 molecule from a species listed herein or described in Chylinski et al., RNA Biology 2013, 10:5,′l2′l-T4 Hou et al. PNAS Early Edition 2013, 1-6.

[0450] In an embodiment, a Cas9 molecule comprises an amino acid sequence having 60%, 65%, 70%, 75%, 80%, 85%, 90%, 95%, 96%, 97%, 98%, or 99% homology with; differs at no more than 1%, 2%, 5%, 10%, 15%, 20%, 30%, or 40% of the amino acid residues when compared with; differs by at least 1, 2, 5, 10 or 20 amino acids but by no more than 100, 80, 70, 60, 50, 40 or 30 amino acids from; or is identical to; S. pyogenes Cas9 (UniProt Q99ZW2). In embodiments, the Cas9 molecule is a S. pyogenes Cas9 variant, such as a variant described in Slaymaker et al., Science Express, available online Dec. 1, 2015 at Science DOI: 10.1126/science.aad5227; Kleinstiver et al., Nature, 529, 2016, pp. 490-495, available online Jan. 6, 2016 at doi:10.1038/nature16526; or US2016/0102324, the contents of which are incorporated herein in their entirety. In an embodiment, the Cas9 molecule is catalytically inactive, e.g., dCas9. Tsai et al. (2014), Nat. Biotech. 32:569-577; U.S. Pat. Nos. 8,871,445; 8,865,406; 8,795,965; 8,771,945; and 8,697,359, the contents of which are hereby incorporated by reference in their entirety. A catalytically inactive Cas9, e.g., dCas9, molecule may be fused with a transcription modulator, e.g., a transcription repressor or transcription activator.

[0451] In embodiments, the Cas9 molecule, e.g, a Cas9 of S. pyogenes, may additionally comprise one or more amino acid sequences that confer additional activity. In some aspects, the Cas9 molecule may comprise one or more nuclear localization sequences (NLSs), such as at least 1, 2, 3, 4, 5, 6, 7, 8, 9, 10, or more NLSs. Typically, an NLS consists of one or more short sequences of positively charged lysines or arginines exposed on the protein surface, but other types of NLS are known. Non-limiting examples of NLSs include an NLS sequence comprising or derived from: the NLS of the SV40 virus large T-antigen, having the amino acid sequence PKKKRKV (SEQ ID NO: 864). Other suitable NLS sequences are known in the art (e.g., Sorokin, Biochemistry (Moscow) (2007) 72:13, 1439-1457; Lange J Biol Chem. (2007) 282:8, 5101-5). In any of the aforementioned embodiments, the Cas9 molecule may additionally (or alternatively) comprise a tag, e.g., a His tag, e.g., a His(6) tag (SEQ ID NO: 865) or His(8) tag (SEQ ID NO: 866), e.g., at the N terminus and/or the C terminus.

[0452] Thus, engineered CRISPR gene editing systems, e.g., for gene editing in eukaryotic cells, typically involve (1) a guide RNA molecule (gRNA) comprising a targeting domain (which is capable of hybridizing to the genomic DNA target sequence), and sequence which is capable of binding to a Cas, e.g., Cas9 enzyme, and (2) a Cas, e.g., Cas9, protein. This second domain may comprise a domain referred to as a tracr domain. The targeting domain and the sequence which is capable of binding to a Cas, e.g., Cas9 enzyme, may be disposed on the same (sometimes referred to as a single gRNA, chimeric gRNA or sgRNA) or different molecules (sometimes referred to as a dual guide RNA, dual gRNA or dgRNA). If disposed on different molecules, each includes a hybridization domain which allows the molecules to associate, e.g., through hybridization.

[0453] gRNA molecule formats are known in the art. An exemplary gRNA molecule, e.g., dgRNA molecule, of the present invention comprises, e.g., consists of, a first nucleic acid having the sequence:

(SEQ ID NO: 867)

nnnnnnnnnnnnnnnnnnnnGUUUUAGAGCUAUGCUGUUUUG,

where the “n”'s refer to the residues of the targeting domain, e.g., a targeting domain to KDM1A, e.g., as described herein, and may consist of 15-25 nucleotides, e.g., consists of 20 nucleotides; and a second nucleic acid sequence having the exemplary sequence:

(SEQ ID NO: 868)

AACUUACCAAGGAACAGCAUAGCAAGUUAAAAUAAGGCUAGUCCGUUAU
CAACUUGAAAAAGUGGCACCGAGUCGGUGC, optionally with 1,
2, 3, 4, 5, 6, or 7 (e.g., 4 or 7, e.g., 7)
additional U nucleotides at the 3′ end.

[0454] The second nucleic acid molecule may alternatively consist of a fragment of the sequence above, wherein such fragment is capable of hybridizing to the first nucleic acid. An example of such second nucleic acid molecule is:

(SEQ ID NO: 869)

AACAGCAUAGCAAGUUAAAAUAAGGCUAGUCCGUUAUCAACUUGAAAAA
GUGGCACCGAGUCGGUGC, optionally with 1, 2, 3, 4, 5,
6, or 7 (e.g., 4 or 7, e.g., 7) additional U
nucleotides at the 3′ end.

[0455] Another exemplary gRNA molecule, e.g., a sgRNA molecule, of the present invention comprises, e.g., consists of a first nucleic acid having the sequence:

(SEQ ID NO: 870)

nnnnnnnnnnnnnnnnnnnGUUUUAGAGCUAGAAAUAGCAAGUUAAAAU
AAGGCUAGUCCGUUAUCAACUUGAAAAAGUGGCACCGAGUCGGUGC,

where the “n”'s refer to the residues of the targeting domain, e.g., a targeting domain to KDM1A, e.g., as described herein, and may consist of 15-25 nucleotides, e.g., consist of 20 nucleotides, optionally with 1, 2, 3, 4, 5, 6, or 7 (e.g., 4 or 7, e.g., 4) additional U nucleotides at the 3′ end.

[0456] Exemplary sequences of gRNA molecule targeting domains useful in the present invention (e.g., which target an LSD1 gene, e.g., KDM1A) are provided in Table 2.

[0457] Additional components and/or elements of CRISPR gene editing systems known in the art, e.g., are described in U.S. Publication No. 2014/0068797, WO2015/048577, and Cong (2013) Science 339: 819-823, the contents of which are hereby incorporated by reference in their entirety. Such systems can be generated which inhibit a target gene, by, for example, engineering a CRISPR gene editing system to include a gRNA molecule comprising a targeting domain that hybridizes to a sequence of the target gene. In embodiments, the gRNA comprises a targeting domain which is fully complementarity to 15-25 nucleotides, e.g., 20 nucleotides, of a target gene, e.g., KDM1A or its regulatory elements. In embodiments, the 15-25 nucleotides, e.g., 20 nucleotides, of the target gene, are disposed immediately 5′ to a protospacer adjacent motif (PAM) sequence recognized by the RNA-guided nuclease, e.g., Cas protein, of the CRISPR gene editing system (e.g., where the system comprises a S. pyogenes Cas9 protein, the PAM sequence comprises NGG, where N can be any of A, T, G or C).

[0458] In embodiments, the gRNA molecule and RNA-guided nuclease, e.g., Cas protein, of the CRISPR gene editing system can be complexed to form a RNP complex. In other embodiments, nucleic acid encoding one or more components of the CRISPR gene editing system may be used.

[0459] In embodiments, foreign DNA can be introduced into the cell along with the CRISPR gene editing system, e.g., DNA encoding a desired transgene, with or without a promoter active in the target cell type. Depending on the sequences of the foreign DNA and target sequence of the genome, this process can be used to integrate the foreign DNA into the genome, at or near the site targeted by the CRISPR gene editing system. For example, 3′ and 5′ sequences flanking the transgene may be included in the foreign DNA which are homologous to the gene sequence 3′ and 5′ (respectively) of the site in the genome cut by the gene editing system. Such foreign DNA molecule can be referred to “template DNA.”

[0460] In an embodiment, the CRISPR gene editing system of the present invention comprises Cas9, e.g., S. pyogenes Cas9, and a gRNA comprising a targeting domain which hybridizes to a sequence of a gene of interest, e.g., KDM1A. In an embodiment, the gRNA and Cas9 are complexed to form a RNP. In an embodiment, the CRISPR gene editing system comprises nucleic acid encoding a gRNA and nucleic acid encoding a Cas protein, e.g., Cas9, e.g., S. pyogenes Cas9. In an embodiment, the CRISPR gene editing system comprises a gRNA and nucleic acid encoding a Cas protein, e.g., Cas9, e.g., S. pyogenes Cas9.

[0461] In an exemplary embodiment, the genome editing system LSD1 inhibitor is a CRISPR system. CRISPR genome editing systems useful in the practice of this invention are described in, for example, Artificial CRISPR/Cas systems can be generated which inhibit LSD1, using technology known in the art, e.g., that are described in U.S. Publication No. 20140068797, and Cong (2013) Science 339: 819-823. Other artificial CRISPR/Cas systems that are known in the art may also be generated which inhibit TCR and/or HLA, e.g., that described in Tsai (2014) Nature Biotechnol., 32:6 569-576, U.S. Pat. Nos. 8,871,445; 8,865,406; 8,795,965; 8,771,945; and 8,697,359.

TABLE 2
Exemplary LSD1 gRNA targeting domain sequences.

| | | SEQ |
|---|---|---|
| Target Gene | gRNA Targeting Domain Sequence | ID NO: |
| KDM1A | AGUGCGACAGGUUCGCUACA | 132 |
| KDM1A | UGGAAUAGCAGAGACUCCGG | 133 |
| KDM1A | CUAAAUAACUGUGAACUCGG | 134 |
| KDM1A | UGCUAUUCCAGUUUCCAUGG | 135 |
| KDM1A | CAGACCCAGGCACGACAGUA | 136 |
| KDM1A | UUUCUGAAACAGGAUCGUGU | 137 |
| KDM1A | UGAGAAGUCAUCCGGUCAUG | 138 |
| KDM1A | GAAUUGCAGACCAGUUUUUG | 139 |
| KDM1A | CGAGUUGCCACAUUUCGCAA | 140 |
| KDM1A | CUGAAACAGGAUCGUGUGGG | 141 |
| KDM1A | GGCGGCCCGAGAUGUUAUCU | 142 |
| KDM1A | UGUAUACCACACCUUGCAUA | 143 |
| KDM1A | AUGUAUACCACACCUUGCAU | 144 |
| KDM1A | UCUUAGUGAAAAGCAAACAC | 145 |
| KDM1A | GGGAUUUGGCAACCUUAACA | 146 |
| KDM1A | UUGUGCCACCUCUCCCUGAG | 147 |
| KDM1A | ACCAAGACCUGUUACCACCA | 148 |
| KDM1A | UCGGCAGUAAUAUCUCUGGG | 149 |
| KDM1A | GGAUCUGACCGCCCUAUGCA | 150 |
| KDM1A | CGUCAUGGUCUUAUCAACUU | 151 |
| KDM1A | UUCAAGACGACAGUUCUGGA | 152 |
| KDM1A | UGAAGUCUAGUUGAUGACUA | 153 |
| KDM1A | CACAGUUAUUUAGAGCGUCA | 154 |
| KDM1A | UGCCAACAGUAUUGGAGCUG | 155 |
| KDM1A | AGUGCCAACAGUAUUGGAGC | 156 |
| KDM1A | GCAUCUGUCUCACAUGCUUG | 157 |
| KDM1A | ACAUCUGCAGUCCAAAGGAU | 158 |
| KDM1A | GGCACAAACUGAACGGCUGG | 159 |
| KDM1A | GGUAAUUAUUAUAGGCUCUG | 160 |
| KDM1A | AAGAUGAGCAGAUUGAACAU | 161 |
| KDM1A | UGGCAGUACGACUGCCAGCA | 162 |
| KDM1A | CGCGGAGGCUCUUUCUUGCG | 163 |
| KDM1A | AUAAGUGACGAUGUGAUUGU | 164 |
| KDM1A | GGCAGUACGACUGCCAGCAG | 165 |
| KDM1A | GGAAAACAUCUGCAGUCCAA | 166 |
| KDM1A | UGCCCGAACAAAUUGACACU | 167 |
| KDM1A | ACUGAAUACAGCAGUGCGAC | 168 |
| KDM1A | CUGGCAGCCACCUGACAGUA | 169 |
| KDM1A | GCAGACCCAGGCACGACAGU | 170 |
| KDM1A | UUUGCUUUUCACUAAGAACU | 171 |
| KDM1A | GGGACACAGGCUUAUUAUUG | 172 |
| KDM1A | UGGCUACUCGUGUGUGCCUG | 173 |
| KDM1A | UCUCCCGCAAAGAAGAGUCG | 174 |
| KDM1A | AACAUCUGCAGUCCAAAGGA | 175 |
| KDM1A | CUUAGUGAAAAGCAAACACA | 176 |
| KDM1A | CCCAGGCACGACAGUAGGGC | 177 |
| KDM1A | GUCAAUUUGUUCGGGCAUGU | 178 |
| KDM1A | GAAUAAGAGCCCCGAGCCCA | 179 |
| KDM1A | CUGCUAUUCCAGUUUCCAUG | 180 |
| KDM1A | GAGAGGUGGCACAAACUGAA | 181 |
| KDM1A | AAGUGAGCCUGAAGAACCAU | 182 |
| KDM1A | UUUGCUUUCUUCGUUAGGUG | 183 |
| KDM1A | AUUUCUGAAACAGGAUCGUG | 184 |
| KDM1A | ACGACAGUAGGGCCGGCCUG | 185 |
| KDM1A | GUCCGUUGGCUUCAUAAAGU | 186 |
| KDM1A | AUACCACACCUUGCAUAGGG | 187 |
| KDM1A | GCUCUAAAUAACUGUGAACU | 188 |
| KDM1A | AGGAGGGAAUCCUAUGGCUG | 189 |
| KDM1A | AUAAAUAAAGGUUUGACUCG | 190 |
| KDM1A | AGCUGAUCUUGGAGCCAUGG | 191 |
| KDM1A | UAAAGGUUUGACUCGUGGAG | 192 |
| KDM1A | UGGACCACAACAGACCCAGA | 193 |
| KDM1A | GAUGAAUUAGCUGAAACACA | 194 |
| KDM1A | AGUAGCCAUUCCUUACUGUC | 195 |
| KDM1A | CUGGCGAGGCAGCGUAUACA | 196 |
| KDM1A | GUUUUCCACUCAGGGAGAGG | 197 |
| KDM1A | CGGAACCGCCGGGGUCCGCA | 198 |
| KDM1A | AGUGAGCCUGAAGAACCAUC | 199 |
| KDM1A | UCAACUUCGGCAUCUAUAAG | 200 |
| KDM1A | GUGGGGCACCUGGAAUCGAG | 201 |
| KDM1A | GGAAUAGCAGAGACUCCGGA | 202 |
| KDM1A | AGCCACCUGACAGUAAGGAA | 203 |
| KDM1A | AUAGUUUCCUUUGCGAAAUG | 204 |
| KDM1A | AGUUGGAAGCGAAUCCCCCA | 205 |
| KDM1A | AUGGCUCAGCCAAUCACUCC | 206 |
| KDM1A | AGCGGCAGCAACCGGGACGG | 207 |
| KDM1A | CUUUUAGCCCAAAGAAACUG | 208 |
| KDM1A | AAGAUGUAGCUUCUAGCAAC | 209 |
| KDM1A | AAUAAUACUCAUCUUCUGAG | 210 |
| KDM1A | CCGGCCCUACUGUCGUGCCU | 211 |
| KDM1A | CUGCUUCUUGAGAAGUCAUC | 212 |
| KDM1A | AGAGCCGACUUCCUCAUGAC | 213 |
| KDM1A | AGGCCUUCUGCUAAAGCCAC | 214 |
| KDM1A | GAAUGACAACUUCCAAUGCC | 215 |
| KDM1A | UGGUUAAAAGGACACUGUCA | 216 |
| KDM1A | UGCUGCUUCAGCACACCCAG | 217 |
| KDM1A | CCGCAAGAAAGAGCCUCCGC | 218 |
| KDM1A | AACUUCCAAUGCCUGGCCAA | 219 |
| KDM1A | AAAGGUUUGACUCGUGGAGC | 220 |
| KDM1A | GUGCCAACAGUAUUGGAGCU | 221 |
| KDM1A | UCAUCCGGUCAUGAGGAAGU | 222 |
| KDM1A | GCCACUAGUGCCAACAGUAU | 223 |
| KDM1A | UAGGGCAAGCUACCUUGUUA | 224 |
| KDM1A | GAUGCCUGGCCAUUCUCAAA | 225 |
| KDM1A | CAACUCUCUCCCUUAAGCAC | 226 |
| KDM1A | UGUUUUCCAGAUAUUAUCAG | 227 |
| KDM1A | CUUCAAGACGACAGUUCUGG | 228 |
| KDM1A | GAUUCCACGACUCUUCUUUG | 229 |
| KDM1A | AUGCAUCUGUCUCACAUGCU | 230 |
| KDM1A | AACUCUCUCCCUUAAGCACU | 231 |
| KDM1A | UCGACUUACAGCUUGUCCGU | 232 |
| KDM1A | UGGUAGCAGUGCAGUACCUC | 233 |
| KDM1A | AGGAGGUCCUUACUUGGUAG | 234 |
| KDM1A | AUAGGUAGAGUACAGAGAGA | 235 |
| KDM1A | GCACUGUGGCUGGGUAGUUA | 236 |
| KDM1A | UUUUCUAGGAGGGAAUCCUA | 237 |
| KDM1A | CGGACCCCGGCGGUUCCGCC | 238 |
| KDM1A | UGCCCACUUUAUGAAGCCAA | 239 |
| KDM1A | GAGCACCAUGCACUGUGGCU | 240 |
| KDM1A | GCAAAGAAGAGUCGUGGAAU | 241 |
| KDM1A | CUCCCUUAAGCACUGGGAUC | 242 |
| KDM1A | AGAUGAUCCUGCAGCAACAU | 243 |
| KDM1A | CCCGCGGAGGCUCUUUCUUG | 244 |
| KDM1A | UCUGCUAUUCCAGUUUCCAU | 245 |
| KDM1A | UGUGGUCCACUGAUAAUAUC | 246 |
| KDM1A | AAUUGCAGACCAGUUUUUGG | 247 |
| KDM1A | UUUAGCUAAAAAGACAGGAA | 248 |
| KDM1A | ACAGCAGGCGGCUCCGAGAA | 249 |
| KDM1A | AUGUCACACUUUUGGAAGCC | 250 |
| KDM1A | UUCUUCCCAGAUAACAUCUC | 251 |
| KDM1A | UCGUUGGCGUGCUGAUCCCU | 252 |
| KDM1A | GCUGAGUGGGCUGCGAGAAG | 253 |
| KDM1A | UCGGACCAGCCGGCGCAAGC | 254 |
| KDM1A | CAUGUAUACGCUGCCUCGCC | 255 |
| KDM1A | GGUUCCGCCAGGCCCCCGGG | 256 |
| KDM1A | UGUGAUUGUUGGCCGAUGCC | 257 |
| KDM1A | AGCCAUUCCUUACUGUCAGG | 258 |
| KDM1A | AAUAAUAAGCCUGUGUCCCU | 259 |
| KDM1A | UCCAAUACUGUUGGCACUAG | 260 |
| KDM1A | UCCAUGGGGGUCGCAGACCC | 261 |
| KDM1A | GGUGGCACAAACUGAACGGC | 262 |
| KDM1A | AAAUCCCUUUGAGAAUGGCC | 263 |
| KDM1A | UGUAGCUGAUCUUGGAGCCA | 264 |
| KDM1A | UCUUAUUCCUAUGUUGCUGC | 265 |
| KDM1A | AACUGGAAUAGCAGAGACUC | 266 |
| KDM1A | UGCAGCGGCAGCAACCGGGA | 267 |
| KDM1A | UAUACAUGGCCCCCAAAAAC | 268 |
| KDM1A | AAUGCCUGGCCAAGGGACAC | 269 |
| KDM1A | AAGAAACUGUGGUGUCUCGU | 270 |
| KDM1A | UGAGGCCCUGCGGACCCCGG | 271 |
| KDM1A | UUUAAAUGCAGCUGCAGUUG | 272 |
| KDM1A | GUGUUUUGAUCGGGUGUUCU | 273 |
| KDM1A | GAUGAUGACUUUGAGUUCAC | 274 |
| KDM1A | AGGUAAUUAUUAUAGGCUCU | 275 |
| KDM1A | GGACUUCAAGACGACAGUUC | 276 |
| KDM1A | GGGGCCUGGCGGAACCGCCG | 277 |
| KDM1A | GAUGUUUUCCACUCAGGGAG | 278 |
| KDM1A | AUCCAAGUGUCAAUUUGUUC | 279 |
| KDM1A | AAUGCAGCUGCAGUUGUGGU | 280 |
| KDM1A | CAGCAGAGCACCAUGCACUG | 281 |
| KDM1A | CCUUCCACAGGGCAAGCAGG | 282 |
| KDM1A | CUGAGUGGGCUGCGAGAAGC | 283 |
| KDM1A | CUUUAUAGAGGUUCCAGAAG | 284 |
| KDM1A | AACUCGGCAGUAAUAUCUCU | 285 |
| KDM1A | ACAGUUACAAAGUUUUGGAA | 286 |
| KDM1A | CAACUUCCAAUGCCUGGCCA | 287 |
| KDM1A | ACUGCAGAUGUUUUCCACUC | 288 |
| KDM1A | AACUACCCAGCCACAGUGCA | 289 |
| KDM1A | CUCCGAGAACGGGUCUGAGG | 290 |
| KDM1A | AAAACCUUCUGGGUCUGUUG | 291 |
| KDM1A | UAUAAGGUGCUUCUAAUUGU | 292 |
| KDM1A | UGGGCAUUUUUGCUUGAUCU | 293 |
| KDM1A | UUCCCCAGCUCCAAUACUGU | 294 |
| KDM1A | CAGCAGGCGGCUCCGAGAAC | 295 |
| KDM1A | GGUUGCCAAAUCCCAUCCUU | 296 |
| KDM1A | GACGACAGUUCUGGAGGGUA | 297 |
| KDM1A | AUACUGUUGGCACUAGUGGC | 298 |
| KDM1A | CUUCAGCACACCCAGGGGAA | 299 |
| KDM1A | UGGUAGAGCAAGAGUUUAAC | 300 |
| KDM1A | CCCGCAAGAAAGAGCCUCCG | 301 |
| KDM1A | UGUGGGGCACCUGGAAUCGA | 302 |
| KDM1A | CGGCUCCGAGAACGGGUCUG | 303 |
| KDM1A | GUGCCUGUGGCUUUAGCAGA | 304 |
| KDM1A | UUGCCAGCUUCUCACCUGUG | 305 |
| KDM1A | GUUUGUUUUCCUUACCUUGG | 306 |
| KDM1A | CAGGUUCGCUACACGGCUUC | 307 |
| KDM1A | AACUCACCCGAUGGUUCUUC | 308 |
| KDM1A | GCUUUCUUCGUUAGGUGUGG | 309 |
| KDM1A | CAAACAAGUAAAUAUGGAAC | 310 |
| KDM1A | ACCCCCUCAAGCCCCACCUG | 311 |
| KDM1A | GCAGCAACCGGGACGGAGGC | 312 |
| KDM1A | AGGAGAAGCUGCUGGUAUCA | 313 |
| KDM1A | UGUUUGCUGACCACAGCCAU | 314 |
| KDM1A | AAAGAUUCAGCUGACAUUUG | 315 |
| KDM1A | UGUCCGUUGGCUUCAUAAAG | 316 |
| KDM1A | CUUGGAGCCAUGGUGGUAAC | 317 |
| KDM1A | AGUUCUGGAGGGUAUGGAGA | 318 |
| KDM1A | CCGCGGGCCUCGCCCCCCGG | 319 |
| KDM1A | CGGCGGCCCGAGAUGUUAUC | 320 |
| KDM1A | UUGCUUUUAGCUAAAAAGAC | 321 |
| KDM1A | GAAUAGCAGAGACUCCGGAG | 322 |
| KDM1A | UUACCUGAUCCCAGUGCUUA | 323 |
| KDM1A | CUGUGGGGCACCUGGAAUCG | 324 |
| KDM1A | CUGUCGGGCCCAGCCGAGGU | 325 |
| KDM1A | AGGGCCGGCCUGAGGCCCUG | 326 |
| KDM1A | CUGCAGAUGUUUUCCACUCA | 327 |
| KDM1A | GAUGUUAUCUGGGAAGAAGG | 328 |
| KDM1A | CUCUGCUAUUCCAGUUUCCA | 329 |
| KDM1A | GAAGGCAUUUACCUUUAUAG | 330 |
| KDM1A | GAAGAAGAUAGUGAAAACUC | 331 |
| KDM1A | GCCGGCCCUACUGUCGUGCC | 332 |
| KDM1A | GGUGGUGUUGUGUUUUGAUC | 333 |
| KDM1A | GCCUGGGUCUGCGACCCCCA | 334 |
| KDM1A | CUGUAUUCAGUUUAAUGUCU | 335 |
| KDM1A | GAACUCGGCAGUAAUAUCUC | 336 |
| KDM1A | CUUUCUUCGUUAGGUGUGGA | 337 |
| KDM1A | CUAGUGGCAGGAGAAGCUGC | 338 |
| KDM1A | CAGGAACACCUGGUGUGGCC | 339 |
| KDM1A | UGCGUCGCAUUUAUAAAUAA | 340 |
| KDM1A | CGAGAUGUUAUCUGGGAAGA | 341 |
| KDM1A | GCUCGACAGUUACAAAGUUU | 342 |
| KDM1A | CGAUGCCUGGCCAUUCUCAA | 343 |
| KDM1A | AAGUCCUCCUGCUUGCCCUG | 344 |
| KDM1A | GGCCACCUCAGACCCGUUCU | 345 |
| KDM1A | AUUGAAAGAACUUCUUAAUA | 346 |
| KDM1A | GCCAUGGUGGUAACAGGUCU | 347 |
| KDM1A | UAGGAGGUCCUUACUUGGUA | 348 |
| KDM1A | GGAAACUAUGUAGCUGAUCU | 349 |
| KDM1A | UUCCUCAGGUGGGGCUUGAG | 350 |
| KDM1A | CUCGAUUCCAGGUGCCCCAC | 351 |
| KDM1A | ACCAAAAAUCCCUUUGAGAA | 352 |
| KDM1A | GGGCCUGUCGGGCCCAGCCG | 353 |
| KDM1A | CGGUUCCGCCAGGCCCCCGG | 354 |
| KDM1A | AAGGUAAUUAUUAUAGGCUC | 355 |
| KDM1A | GUUCUCUGUACCCUUCCCCU | 356 |
| KDM1A | AUACUCAUCUUCUGAGAGGU | 357 |
| KDM1A | CGAGACACCACAGUUUCUUU | 358 |
| KDM1A | GGUCAGCAAACAAGUAAAUA | 359 |
| KDM1A | AGAAUUGCAGACCAGUUUUU | 360 |
| KDM1A | UGUGUUUUGAUCGGGUGUUC | 361 |
| KDM1A | GCUUCAGCACACCCAGGGGA | 362 |
| KDM1A | GUAGGAGGUCCUUACUUGGU | 363 |
| KDM1A | UUGGCAGUACGACUGCCAGC | 364 |
| KDM1A | GGAGAGAGUUGAGAGAGGUG | 365 |
| KDM1A | GUCGGACCAGCCGGCGCAAG | 366 |
| KDM1A | AGAAGAAAAACUUCAGGAGU | 367 |
| KDM1A | GCUGGCCCUGGGACAGCAGG | 368 |
| KDM1A | CAGAGAGAUGGAUGAAAGCU | 369 |
| KDM1A | UUAAGGGAGAGAGUUGAGAG | 370 |
| KDM1A | GGGGGCCUGGCGGAACCGCC | 371 |
| KDM1A | UACCUGAUCCCAGUGCUUAA | 372 |
| KDM1A | UGGGAAGAAGGCGGCAGCCG | 373 |
| KDM1A | GCUGGGCCCGACAGGCCCGC | 374 |
| KDM1A | CUCUUCUGGAACCUCUAUAA | 375 |
| KDM1A | ACUGAUAAUAUCUGGAAAAC | 376 |
| KDM1A | CGGAGGGGCGUCGGACCAGC | 377 |
| KDM1A | UGUCACACUUUUGGAAGCCA | 378 |
| KDM1A | GCGCAGCCCGCGGGCCUGUC | 379 |
| KDM1A | AUUCCACGACUCUUCUUUGC | 380 |
| KDM1A | AUGCUUCUUUGUAUUGCUGA | 381 |
| KDM1A | CUUUGAGAAUGGCCAGGCAU | 382 |
| KDM1A | AAGAAUUGCAGACCAGUUUU | 383 |
| KDM1A | CUGCCUCGCCAGGCCACACC | 384 |
| KDM1A | CUGUGCAGGAACACCUGGUG | 385 |
| KDM1A | GGAAUAAGAGCCCCGAGCCC | 386 |
| KDM1A | CCGGGACGGAGGCUGGCCCU | 387 |
| KDM1A | CGGAGCCGCCUGCUGUCCCA | 388 |
| KDM1A | CAGAGACUCCGGAGGGGCGU | 389 |
| KDM1A | CUGCUGCUUCAGCACACCCA | 390 |
| KDM1A | GUGCAUGGUGCUCUGCUGAG | 391 |
| KDM1A | ACAGGAAAGGUAAUUAUUAU | 392 |
| KDM1A | UUUCCUUCCACAGGGCAAGC | 393 |
| KDM1A | CAGCCGGCGCAAGCGGGCGA | 394 |
| KDM1A | UGCAUGGUGCUCUGCUGAGU | 395 |
| KDM1A | GCUGCUGCUUCAGCACACCC | 396 |
| KDM1A | UGUCGGGCCCAGCCGAGGUC | 397 |
| KDM1A | CGUGCUGAUCCCUGGGCUCG | 398 |
| KDM1A | GCGGUUCCGCCAGGCCCCCG | 399 |
| KDM1A | ACACACUACUUACUGUUAUA | 400 |
| KDM1A | UAAGCCUGUGUCCCUUGGCC | 401 |
| KDM1A | GCAGUCCAAAGGAUGGGAUU | 402 |
| KDM1A | GGCCCAGCCGAGGUCGGGCC | 403 |
| KDM1A | ACACCUGGUGUGGCCUGGCG | 404 |
| KDM1A | GAUCCAAGUGUCAAUUUGUU | 405 |
| KDM1A | UCAAAUGUCAGCUGAAUCUU | 406 |
| KDM1A | GGGCCCAGCCGAGGUCGGGC | 407 |
| KDM1A | CGACAGGCCCGCGGGCUGCG | 408 |
| KDM1A | GGUCAUGAGGAAGUCGGCUC | 409 |
| KDM1A | UCCGCGGGCCUCGCCCCCCG | 410 |
| KDM1A | CUCGUUGGCGUGCUGAUCCC | 411 |
| KDM1A | ACGAGACACCACAGUUUCUU | 412 |
| KDM1A | UGUGUCCCUUGGCCAGGCAU | 413 |
| KDM1A | GAGGAAGAGCUCACCCCUGC | 414 |
| KDM1A | CGGCUGCAGCGGCAGCAACC | 415 |
| KDM1A | AGUUCUCUGUACCCUUCCCC | 416 |
| KDM1A | CCGCGGAGGCUCUUUCUUGC | 417 |
| KDM1A | GAGAAAUGCCAAAGCAGAGA | 418 |
| KDM1A | GAAGAAGGCGGCAGCCGCGG | 419 |
| KDM1A | CCCCCGGCCCGACCUCGGCU | 420 |
| KDM1A | GGCUGGGCCCGACAGGCCCG | 421 |
| KDM1A | UCUGCGACCCCCAUGGAAAC | 422 |
| KDM1A | GCCUGAGGCCCUGCGGACCC | 423 |
| KDM1A | AGGUGGUGUUGUGUUUUGAU | 424 |
| KDM1A | UUCAUUUUCUUCCUCAGGUG | 425 |
| KDM1A | UUACCUUCGCCCGCUUGCGC | 426 |
| KDM1A | GCCCAGCCGAGGUCGGGCCG | 427 |
| KDM1A | CCCAGGGCCAGCCUCCGUCC | 428 |
| KDM1A | CCGGGGGGCGAGGCCCGCGG | 429 |
| KDM1A | UCUUCCUCAGGUGGGGCUUG | 430 |
| KDM1A | CGACCUCGGCUGGGCCCGAC | 431 |
| KDM1A | UAUGGAGACGGCCAAGCAUC | 432 |
| KDM1A | UAUGUUGCUGCAGGAUCAUC | 433 |
| KDM1A | CUUCUUCCCAGAUAACAUCU | 434 |
| KDM1A | GCCAUUCUCAAAGGGAUUUU | 435 |
| KDM1A | GGCGUGCUGAUCCCUGGGCU | 436 |
| KDM1A | CUCGCCCCCCGGGGGCCUGG | 437 |
| KDM1A | GAGACAGACAAAUACUUGAU | 438 |
| KDM1A | GGGUCCGCAGGGCCUCAGGC | 439 |
| KDM1A | ACUCCUGGCCCCUCGAUUCC | 440 |
| KDM1A | CGCGCAGCCCGCGGGCCUGU | 441 |
| KDM1A | GUGCGCUCCCCCACCGCCCC | 442 |
| KDM1A | CUUUCAUUUUCUUCCUCAGG | 443 |
| KDM1A | GAGGCUGGCCCUGGGACAGC | 444 |
| KDM1A | UGCCACCCUCACCUGAUGCU | 445 |
| KDM1A | GAGGUGGCCGCGCAGCCCGC | 446 |
| KDM1A | UUUCAUUUUCUUCCUCAGGU | 447 |
| KDM1A | AUCGAGGGGCCAGGAGUGAU | 448 |
| KDM1A | CGGCUGGUCCGACGCCCCUC | 449 |
| KDM1A | CGGGGGCCUGGCGGAACCGC | 450 |
| KDM1A | CUUCUCACCUGUGGGGCACC | 451 |
| KDM1A | AGGUCGGGCCGGGGGCGGUG | 452 |
| KDM1A | CGCUGCAGCCGCCGCCGCCG | 453 |
| KDM1A | AGAGCACCAUGCACUGUGGC | 454 |
| KDM1A | CCCAGCCGAGGUCGGGCCGG | 455 |
| KDM1A | GACUGCUGUGCAGGAACACC | 456 |
| KDM1A | AGGCUCUGGGGUCUCAGGCU | 457 |
| KDM1A | UGAGGUGGCCGCGCAGCCCG | 458 |
| KDM1A | GCGUGCUGAUCCCUGGGCUC | 459 |
| KDM1A | CUUCGCCCGCUUGCGCCGGC | 460 |
| KDM1A | GCACCUGGAAUCGAGGGGCC | 461 |
| KDM1A | UCCUAAAGAGAAAGAUGAAA | 462 |
| KDM1A | AUGCUUGGGGACUGCUGUGC | 463 |
| KDM1A | AAUGAAAAGAAAAACCUUCU | 464 |
| KDM1A | GCGGAACCGCCGGGGUCCGC | 465 |
| KDM1A | GAGGUCGGGCCGGGGGCGGU | 466 |
| KDM1A | AUUAUAGGCUCUGGGGUCUC | 467 |
| KDM1A | UCACUUUCAUUUUCUUCCUC | 468 |
| KDM1A | UCGGAGCCGCCUGCUGUCCC | 469 |
| KDM1A | AGCCGAGGUCGGGCCGGGGG | 470 |
| KDM1A | AAAGCUAGAAGAAAAACUUC | 471 |
| KDM1A | UCCUCAGGUGGGGCUUGAGG | 472 |
| KDM1A | CGGCGGUUCCGCCAGGCCCC | 473 |
| KDM1A | UGCAUCUGUCUCACAUGCUU | 474 |
| KDM1A | GGCGGUUCCGCCAGGCCCCC | 475 |
| KDM1A | ACCGGGACGGAGGCUGGCCC | 476 |
| KDM1A | CACCGCCCCCGGCCCGACCU | 477 |
| KDM1A | CGCCAGGCCCCCGGGGGGCG | 478 |
| KDM1A | GGGGUGAGCUCUUCCUCUUC | 479 |
| KDM1A | ACCAUUUCAUCUUUCUCUUU | 480 |
| KDM1A | GGCCUCGCCCCCCGGGGGCC | 481 |
| KDM1A | GCCCCCGGCCCGACCUCGGC | 482 |
| KDM1A | UGGGGCUUGAGGGGGUGGUG | 483 |
| KDM1A | GCCGGGGUCCGCAGGGCCUC | 484 |
| KDM1A | CUUCUUUUCCUUCUCUGCUU | 485 |
| KDM1A | CCUCCGCGGGCCUCGCCCCC | 486 |
| KDM1A | CUCCGCGGGCCUCGCCCCCC | 487 |
| KDM1A | GGUCGGGCCGGGGGCGGUGG | 488 |
| KDM1A | UGGAAUGGAUGUCACACUUU | 489 |
| KDM1A | CUUCCUCAGGUGGGGCUUGA | 490 |
| KDM1A | GUGGGGCUUGAGGGGGUGGU | 491 |
| KDM1A | GCGGCUGCAGCGGCAGCAAC | 492 |
| KDM1A | CCCCCGGGGGGCGAGGCCCG | 493 |
| KDM1A | UAAUGAAAAGAAAAACCUUC | 494 |
| KDM1A | CGCGGCGGCGGCGGCUGCAG | 495 |
| KDM1A | UCAGGUGGGGCUUGAGGGGG | 496 |
| KDM1A | GGUGGGGCUUGAGGGGGUGG | 497 |
| KDM1A | UGGAAAUGACUAUGAUUUAA | 498 |
| KDM1A | GGGGCUUGAGGGGGUGGUGG | 499 |
| KDM1A | CGAGGUCGGGCCGGGGGCGG | 500 |
| KDM1A | GGCGGCAGCCGCGGCGGCGG | 501 |
| KDM1A | GAAGGCGGCAGCCGCGGCGG | 502 |
| KDM1A | AGUGCGACAGGUUCGCUACA | 503 |
| KDM1A | UGGAAUAGCAGAGACUCCGG | 504 |
| KDM1A | CUAAAUAACUGUGAACUCGG | 505 |
| KDM1A | UGCUAUUCCAGUUUCCAUGG | 506 |
| KDM1A | CAGACCCAGGCACGACAGUA | 507 |
| KDM1A | UUUCUGAAACAGGAUCGUGU | 508 |
| KDM1A | UGAGAAGUCAUCCGGUCAUG | 509 |
| KDM1A | GAAUUGCAGACCAGUUUUUG | 510 |
| KDM1A | CGAGUUGCCACAUUUCGCAA | 511 |
| KDM1A | CUGAAACAGGAUCGUGUGGG | 512 |
| KDM1A | GGCGGCCCGAGAUGUUAUCU | 513 |
| KDM1A | UGUAUACCACACCUUGCAUA | 514 |
| KDM1A | UCUUAGUGAAAAGCAAACAC | 515 |
| KDM1A | AUGUAUACCACACCUUGCAU | 516 |
| KDM1A | GGGAUUUGGCAACCUUAACA | 517 |
| KDM1A | UUGUGCCACCUCUCCCUGAG | 518 |
| KDM1A | GGAUCUGACCGCCCUAUGCA | 519 |
| KDM1A | ACCAAGACCUGUUACCACCA | 520 |
| KDM1A | CGUCAUGGUCUUAUCAACUU | 521 |
| KDM1A | UGAAGUCUAGUUGAUGACUA | 522 |
| KDM1A | CACAGUUAUUUAGAGCGUCA | 523 |
| KDM1A | UCGGCAGUAAUAUCUCUGGG | 524 |
| KDM1A | UGCCAACAGUAUUGGAGCUG | 525 |
| KDM1A | GCAUCUGUCUCACAUGCUUG | 526 |
| KDM1A | AGUGCCAACAGUAUUGGAGC | 527 |
| KDM1A | ACAUCUGCAGUCCAAAGGAU | 528 |
| KDM1A | GGCACAAACUGAACGGCUGG | 529 |
| KDM1A | UGGCAGUACGACUGCCAGCA | 530 |
| KDM1A | AAGAUGAGCAGAUUGAACAU | 531 |
| KDM1A | GGUAAUUAUUAUAGGCUCUG | 532 |
| KDM1A | CGCGGAGGCUCUUUCUUGCG | 533 |
| KDM1A | AUAAGUGACGAUGUGAUUGU | 534 |
| KDM1A | GGCAGUACGACUGCCAGCAG | 535 |
| KDM1A | UGCCCGAACAAAUUGACACU | 536 |
| KDM1A | GGAAAACAUCUGCAGUCCAA | 537 |
| KDM1A | ACUGAAUACAGCAGUGCGAC | 538 |
| KDM1A | UUUGCUUUUCACUAAGAACU | 539 |
| KDM1A | CUGGCAGCCACCUGACAGUA | 540 |
| KDM1A | GCAGACCCAGGCACGACAGU | 541 |
| KDM1A | GGGACACAGGCUUAUUAUUG | 542 |
| KDM1A | UGGCUACUCGUGUGUGCCUG | 543 |
| KDM1A | AACAUCUGCAGUCCAAAGGA | 544 |
| KDM1A | CCCAGGCACGACAGUAGGGC | 545 |
| KDM1A | CUUAGUGAAAAGCAAACACA | 546 |
| KDM1A | UCUCCCGCAAAGAAGAGUCG | 547 |
| KDM1A | GUCAAUUUGUUCGGGCAUGU | 548 |
| KDM1A | CUGCUAUUCCAGUUUCCAUG | 549 |
| KDM1A | GAAUAAGAGCCCCGAGCCCA | 550 |
| KDM1A | AAGUGAGCCUGAAGAACCAU | 551 |
| KDM1A | UUUGCUUUCUUCGUUAGGUG | 552 |
| KDM1A | AUUUCUGAAACAGGAUCGUG | 553 |
| KDM1A | GAGAGGUGGCACAAACUGAA | 554 |
| KDM1A | GUCCGUUGGCUUCAUAAAGU | 555 |
| KDM1A | ACGACAGUAGGGCCGGCCUG | 556 |
| KDM1A | AUACCACACCUUGCAUAGGG | 557 |
| KDM1A | GCUCUAAAUAACUGUGAACU | 558 |
| KDM1A | AGGAGGGAAUCCUAUGGCUG | 559 |
| KDM1A | AUAAAUAAAGGUUUGACUCG | 560 |
| KDM1A | CUGGCGAGGCAGCGUAUACA | 561 |
| KDM1A | AGCUGAUCUUGGAGCCAUGG | 562 |
| KDM1A | UAAAGGUUUGACUCGUGGAG | 563 |
| KDM1A | AGUAGCCAUUCCUUACUGUC | 564 |
| KDM1A | GUUUUCCACUCAGGGAGAGG | 565 |
| KDM1A | UGGACCACAACAGACCCAGA | 566 |
| KDM1A | GAUGAAUUAGCUGAAACACA | 567 |
| KDM1A | AGUGAGCCUGAAGAACCAUC | 568 |
| KDM1A | CGGAACCGCCGGGGUCCGCA | 569 |
| KDM1A | UCAACUUCGGCAUCUAUAAG | 570 |
| KDM1A | GUGGGGCACCUGGAAUCGAG | 571 |
| KDM1A | AUAGUUUCCUUUGCGAAAUG | 572 |
| KDM1A | GGAAUAGCAGAGACUCCGGA | 573 |
| KDM1A | AGCCACCUGACAGUAAGGAA | 574 |
| KDM1A | AUGGCUCAGCCAAUCACUCC | 575 |
| KDM1A | AGCGGCAGCAACCGGGACGG | 576 |
| KDM1A | AGUUGGAAGCGAAUCCCCCA | 577 |
| KDM1A | CUUUUAGCCCAAAGAAACUG | 578 |
| KDM1A | AAGAUGUAGCUUCUAGCAAC | 579 |
| KDM1A | CCGGCCCUACUGUCGUGCCU | 580 |
| KDM1A | AGAGCCGACUUCCUCAUGAC | 581 |
| KDM1A | AAUAAUACUCAUCUUCUGAG | 582 |
| KDM1A | CUGCUUCUUGAGAAGUCAUC | 583 |
| KDM1A | AGGCCUUCUGCUAAAGCCAC | 584 |
| KDM1A | GAAUGACAACUUCCAAUGCC | 585 |
| KDM1A | CCGCAAGAAAGAGCCUCCGC | 586 |
| KDM1A | UGCUGCUUCAGCACACCCAG | 587 |
| KDM1A | AACUUCCAAUGCCUGGCCAA | 588 |
| KDM1A | AAAGGUUUGACUCGUGGAGC | 589 |
| KDM1A | GUGCCAACAGUAUUGGAGCU | 590 |
| KDM1A | GCCACUAGUGCCAACAGUAU | 591 |
| KDM1A | UAGGGCAAGCUACCUUGUUA | 592 |
| KDM1A | CAACUCUCUCCCUUAAGCAC | 593 |
| KDM1A | UCAUCCGGUCAUGAGGAAGU | 594 |
| KDM1A | GAUGCCUGGCCAUUCUCAAA | 595 |
| KDM1A | UGUUUUCCAGAUAUUAUCAG | 596 |
| KDM1A | AUGCAUCUGUCUCACAUGCU | 597 |
| KDM1A | GAUUCCACGACUCUUCUUUG | 598 |
| KDM1A | UGGUAGCAGUGCAGUACCUC | 599 |
| KDM1A | AACUCUCUCCCUUAAGCACU | 600 |
| KDM1A | UCGACUUACAGCUUGUCCGU | 601 |
| KDM1A | AGGAGGUCCUUACUUGGUAG | 602 |
| KDM1A | GCACUGUGGCUGGGUAGUUA | 603 |
| KDM1A | AUAGGUAGAGUACAGAGAGA | 604 |
| KDM1A | CGGACCCCGGCGGUUCCGCC | 605 |
| KDM1A | UUUUCUAGGAGGGAAUCCUA | 606 |
| KDM1A | GAGCACCAUGCACUGUGGCU | 607 |
| KDM1A | UGCCCACUUUAUGAAGCCAA | 608 |
| KDM1A | CUCCCUUAAGCACUGGGAUC | 609 |
| KDM1A | GCAAAGAAGAGUCGUGGAAU | 610 |
| KDM1A | CCCGCGGAGGCUCUUUCUUG | 611 |
| KDM1A | AGAUGAUCCUGCAGCAACAU | 612 |
| KDM1A | AAUUGCAGACCAGUUUUUGG | 613 |
| KDM1A | UGUGGUCCACUGAUAAUAUC | 614 |
| KDM1A | UUUAGCUAAAAAGACAGGAA | 615 |
| KDM1A | UCUGCUAUUCCAGUUUCCAU | 616 |
| KDM1A | ACAGCAGGCGGCUCCGAGAA | 617 |
| KDM1A | AUGUCACACUUUUGGAAGCC | 618 |
| KDM1A | UUCUUCCCAGAUAACAUCUC | 619 |
| KDM1A | CAUGUAUACGCUGCCUCGCC | 620 |
| KDM1A | GCUGAGUGGGCUGCGAGAAG | 621 |
| KDM1A | UCGUUGGCGUGCUGAUCCCU | 622 |
| KDM1A | UCGGACCAGCCGGCGCAAGC | 623 |
| KDM1A | AGCCAUUCCUUACUGUCAGG | 624 |
| KDM1A | UGUGAUUGUUGGCCGAUGCC | 625 |
| KDM1A | AAUAAUAAGCCUGUGUCCCU | 626 |
| KDM1A | GGUUCCGCCAGGCCCCCGGG | 627 |
| KDM1A | UCCAAUACUGUUGGCACUAG | 628 |
| KDM1A | UGUAGCUGAUCUUGGAGCCA | 629 |
| KDM1A | UCCAUGGGGGUCGCAGACCC | 630 |
| KDM1A | AAAUCCCUUUGAGAAUGGCC | 631 |
| KDM1A | GGUGGCACAAACUGAACGGC | 632 |
| KDM1A | AACUGGAAUAGCAGAGACUC | 633 |
| KDM1A | UGCAGCGGCAGCAACCGGGA | 634 |
| KDM1A | UCUUAUUCCUAUGUUGCUGC | 635 |
| KDM1A | UAUACAUGGCCCCCAAAAAC | 636 |
| KDM1A | AAUGCCUGGCCAAGGGACAC | 637 |
| KDM1A | AAGAAACUGUGGUGUCUCGU | 638 |
| KDM1A | UUUAAAUGCAGCUGCAGUUG | 639 |
| KDM1A | UGAGGCCCUGCGGACCCCGG | 640 |
| KDM1A | AGGUAAUUAUUAUAGGCUCU | 641 |
| KDM1A | GUGUUUUGAUCGGGUGUUCU | 642 |
| KDM1A | GAUGAUGACUUUGAGUUCAC | 643 |
| KDM1A | AUCCAAGUGUCAAUUUGUUC | 644 |
| KDM1A | GGGGCCUGGCGGAACCGCCG | 645 |
| KDM1A | GAUGUUUUCCACUCAGGGAG | 646 |
| KDM1A | AAUGCAGCUGCAGUUGUGGU | 647 |
| KDM1A | CAGCAGAGCACCAUGCACUG | 648 |
| KDM1A | CUGAGUGGGCUGCGAGAAGC | 649 |
| KDM1A | CUUUAUAGAGGUUCCAGAAG | 650 |
| KDM1A | ACAGUUACAAAGUUUUGGAA | 651 |
| KDM1A | CAACUUCCAAUGCCUGGCCA | 652 |
| KDM1A | AACUCGGCAGUAAUAUCUCU | 653 |
| KDM1A | AACUACCCAGCCACAGUGCA | 654 |
| KDM1A | ACUGCAGAUGUUUUCCACUC | 655 |
| KDM1A | UAUAAGGUGCUUCUAAUUGU | 656 |
| KDM1A | CUCCGAGAACGGGUCUGAGG | 657 |
| KDM1A | AAAACCUUCUGGGUCUGUUG | 658 |
| KDM1A | UGGGCAUUUUUGCUUGAUCU | 659 |
| KDM1A | GGUUGCCAAAUCCCAUCCUU | 660 |
| KDM1A | CAGCAGGCGGCUCCGAGAAC | 661 |
| KDM1A | UUCCCCAGCUCCAAUACUGU | 662 |
| KDM1A | AUACUGUUGGCACUAGUGGC | 663 |
| KDM1A | CUUCAGCACACCCAGGGGAA | 664 |
| KDM1A | UGGUAGAGCAAGAGUUUAAC | 665 |
| KDM1A | CCCGCAAGAAAGAGCCUCCG | 666 |
| KDM1A | UGUGGGGCACCUGGAAUCGA | 667 |
| KDM1A | CGGCUCCGAGAACGGGUCUG | 668 |
| KDM1A | CAGGUUCGCUACACGGCUUC | 669 |
| KDM1A | UUGCCAGCUUCUCACCUGUG | 670 |
| KDM1A | GUUUGUUUUCCUUACCUUGG | 671 |
| KDM1A | GUGCCUGUGGCUUUAGCAGA | 672 |
| KDM1A | ACCCCCUCAAGCCCCACCUG | 673 |
| KDM1A | AACUCACCCGAUGGUUCUUC | 674 |
| KDM1A | GCUUUCUUCGUUAGGUGUGG | 675 |
| KDM1A | CAAACAAGUAAAUAUGGAAC | 676 |
| KDM1A | GCAGCAACCGGGACGGAGGC | 677 |
| KDM1A | AAAGAUUCAGCUGACAUUUG | 678 |
| KDM1A | UGUUUGCUGACCACAGCCAU | 679 |
| KDM1A | AGGAGAAGCUGCUGGUAUCA | 680 |
| KDM1A | UGUCCGUUGGCUUCAUAAAG | 681 |
| KDM1A | CUUGGAGCCAUGGUGGUAAC | 682 |
| KDM1A | CCGCGGGCCUCGCCCCCCGG | 683 |
| KDM1A | UUGCUUUUAGCUAAAAAGAC | 684 |
| KDM1A | CGGCGGCCCGAGAUGUUAUC | 685 |
| KDM1A | GAAUAGCAGAGACUCCGGAG | 686 |
| KDM1A | UUACCUGAUCCCAGUGCUUA | 687 |
| KDM1A | CUGUGGGGCACCUGGAAUCG | 688 |
| KDM1A | CUGUCGGGCCCAGCCGAGGU | 689 |
| KDM1A | AGGGCCGGCCUGAGGCCCUG | 690 |
| KDM1A | CUGCAGAUGUUUUCCACUCA | 691 |
| KDM1A | GAUGUUAUCUGGGAAGAAGG | 692 |
| KDM1A | GAAGGCAUUUACCUUUAUAG | 693 |
| KDM1A | CUCUGCUAUUCCAGUUUCCA | 694 |
| KDM1A | GAAGAAGAUAGUGAAAACUC | 695 |
| KDM1A | GCCGGCCCUACUGUCGUGCC | 696 |
| KDM1A | GGUGGUGUUGUGUUUUGAUC | 697 |
| KDM1A | CUGUAUUCAGUUUAAUGUCU | 698 |
| KDM1A | GCCUGGGUCUGCGACCCCCA | 699 |
| KDM1A | CUAGUGGCAGGAGAAGCUGC | 700 |
| KDM1A | GAACUCGGCAGUAAUAUCUC | 701 |
| KDM1A | CUUUCUUCGUUAGGUGUGGA | 702 |
| KDM1A | CAGGAACACCUGGUGUGGCC | 703 |
| KDM1A | UGCGUCGCAUUUAUAAAUAA | 704 |
| KDM1A | GCUCGACAGUUACAAAGUUU | 705 |
| KDM1A | CGAGAUGUUAUCUGGGAAGA | 706 |
| KDM1A | GGCCACCUCAGACCCGUUCU | 707 |
| KDM1A | CGAUGCCUGGCCAUUCUCAA | 708 |
| KDM1A | AUUGAAAGAACUUCUUAAUA | 709 |
| KDM1A | UAGGAGGUCCUUACUUGGUA | 710 |
| KDM1A | GCCAUGGUGGUAACAGGUCU | 711 |
| KDM1A | GGAAACUAUGUAGCUGAUCU | 712 |
| KDM1A | UUCCUCAGGUGGGGCUUGAG | 713 |
| KDM1A | CUCGAUUCCAGGUGCCCCAC | 714 |
| KDM1A | CGGUUCCGCCAGGCCCCCGG | 715 |
| KDM1A | ACCAAAAAUCCCUUUGAGAA | 716 |
| KDM1A | GUUCUCUGUACCCUUCCCCU | 717 |
| KDM1A | GGGCCUGUCGGGCCCAGCCG | 718 |
| KDM1A | AAGGUAAUUAUUAUAGGCUC | 719 |
| KDM1A | GGUCAGCAAACAAGUAAAUA | 720 |
| KDM1A | CGAGACACCACAGUUUCUUU | 721 |
| KDM1A | AGAAUUGCAGACCAGUUUUU | 722 |
| KDM1A | AUACUCAUCUUCUGAGAGGU | 723 |
| KDM1A | UGUGUUUUGAUCGGGUGUUC | 724 |
| KDM1A | GGAGAGAGUUGAGAGAGGUG | 725 |
| KDM1A | GCUUCAGCACACCCAGGGGA | 726 |
| KDM1A | GUAGGAGGUCCUUACUUGGU | 727 |
| KDM1A | GUCGGACCAGCCGGCGCAAG | 728 |
| KDM1A | UUGGCAGUACGACUGCCAGC | 729 |
| KDM1A | AGAAGAAAAACUUCAGGAGU | 730 |
| KDM1A | GCUGGCCCUGGGACAGCAGG | 731 |
| KDM1A | CAGAGAGAUGGAUGAAAGCU | 732 |
| KDM1A | UUAAGGGAGAGAGUUGAGAG | 733 |
| KDM1A | GGGGGCCUGGCGGAACCGCC | 734 |
| KDM1A | UACCUGAUCCCAGUGCUUAA | 735 |
| KDM1A | UGGGAAGAAGGCGGCAGCCG | 736 |
| KDM1A | UGUCACACUUUUGGAAGCCA | 737 |
| KDM1A | GCUGGGCCCGACAGGCCCGC | 738 |
| KDM1A | CUCUUCUGGAACCUCUAUAA | 739 |
| KDM1A | ACUGAUAAUAUCUGGAAAAC | 740 |
| KDM1A | CGGAGGGGCGUCGGACCAGC | 741 |
| KDM1A | CUUUGAGAAUGGCCAGGCAU | 742 |
| KDM1A | GCGCAGCCCGCGGGCCUGUC | 743 |
| KDM1A | AUUCCACGACUCUUCUUUGC | 744 |
| KDM1A | AUGCUUCUUUGUAUUGCUGA | 745 |
| KDM1A | AAGAAUUGCAGACCAGUUUU | 746 |
| KDM1A | CUGUGCAGGAACACCUGGUG | 747 |
| KDM1A | GGAAUAAGAGCCCCGAGCCC | 748 |
| KDM1A | CUGCCUCGCCAGGCCACACC | 749 |
| KDM1A | CCGGGACGGAGGCUGGCCCU | 750 |
| KDM1A | CAGAGACUCCGGAGGGGCGU | 751 |
| KDM1A | CGGAGCCGCCUGCUGUCCCA | 752 |
| KDM1A | GUGCAUGGUGCUCUGCUGAG | 753 |
| KDM1A | CUGCUGCUUCAGCACACCCA | 754 |
| KDM1A | ACAGGAAAGGUAAUUAUUAU | 755 |
| KDM1A | CAGCCGGCGCAAGCGGGCGA | 756 |
| KDM1A | UGCAUGGUGCUCUGCUGAGU | 757 |
| KDM1A | GCUGCUGCUUCAGCACACCC | 758 |
| KDM1A | UGUCGGGCCCAGCCGAGGUC | 759 |
| KDM1A | CGUGCUGAUCCCUGGGCUCG | 760 |
| KDM1A | GCGGUUCCGCCAGGCCCCCG | 761 |
| KDM1A | GCAGUCCAAAGGAUGGGAUU | 762 |
| KDM1A | ACACACUACUUACUGUUAUA | 763 |
| KDM1A | UAAGCCUGUGUCCCUUGGCC | 764 |
| KDM1A | GGCCCAGCCGAGGUCGGGCC | 765 |
| KDM1A | ACACCUGGUGUGGCCUGGCG | 766 |
| KDM1A | GAUCCAAGUGUCAAUUUGUU | 767 |
| KDM1A | UCAAAUGUCAGCUGAAUCUU | 768 |
| KDM1A | GGGCCCAGCCGAGGUCGGGC | 769 |
| KDM1A | CGACAGGCCCGCGGGCUGCG | 770 |
| KDM1A | GGUCAUGAGGAAGUCGGCUC | 771 |
| KDM1A | UCCGCGGGCCUCGCCCCCCG | 772 |
| KDM1A | CUCGUUGGCGUGCUGAUCCC | 773 |
| KDM1A | ACGAGACACCACAGUUUCUU | 774 |
| KDM1A | UGUGUCCCUUGGCCAGGCAU | 775 |
| KDM1A | CGGCUGCAGCGGCAGCAACC | 776 |
| KDM1A | GAGGAAGAGCUCACCCCUGC | 777 |
| KDM1A | AGUUCUCUGUACCCUUCCCC | 778 |
| KDM1A | CCGCGGAGGCUCUUUCUUGC | 779 |
| KDM1A | GAGAAAUGCCAAAGCAGAGA | 780 |
| KDM1A | CCCCCGGCCCGACCUCGGCU | 781 |
| KDM1A | GAAGAAGGCGGCAGCCGCGG | 782 |
| KDM1A | GGCUGGGCCCGACAGGCCCG | 783 |
| KDM1A | UCUGCGACCCCCAUGGAAAC | 784 |
| KDM1A | GCCUGAGGCCCUGCGGACCC | 785 |
| KDM1A | AGGUGGUGUUGUGUUUUGAU | 786 |
| KDM1A | UUCAUUUUCUUCCUCAGGUG | 787 |
| KDM1A | UUACCUUCGCCCGCUUGCGC | 788 |
| KDM1A | GCCCAGCCGAGGUCGGGCCG | 789 |
| KDM1A | CCGGGGGGCGAGGCCCGCGG | 790 |
| KDM1A | CCCAGGGCCAGCCUCCGUCC | 791 |
| KDM1A | UCUUCCUCAGGUGGGGCUUG | 792 |
| KDM1A | CGACCUCGGCUGGGCCCGAC | 793 |
| KDM1A | CUUCUUCCCAGAUAACAUCU | 794 |
| KDM1A | UAUGUUGCUGCAGGAUCAUC | 795 |
| KDM1A | CUCGCCCCCCGGGGGCCUGG | 796 |
| KDM1A | GCCAUUCUCAAAGGGAUUUU | 797 |
| KDM1A | GGCGUGCUGAUCCCUGGGCU | 798 |
| KDM1A | GAGACAGACAAAUACUUGAU | 799 |
| KDM1A | GGGUCCGCAGGGCCUCAGGC | 800 |
| KDM1A | ACUCCUGGCCCCUCGAUUCC | 801 |
| KDM1A | CGCGCAGCCCGCGGGCCUGU | 802 |
| KDM1A | CUUUCAUUUUCUUCCUCAGG | 803 |
| KDM1A | GUGCGCUCCCCCACCGCCCC | 804 |
| KDM1A | GAGGCUGGCCCUGGGACAGC | 805 |
| KDM1A | UUUCAUUUUCUUCCUCAGGU | 806 |
| KDM1A | CGGCUGGUCCGACGCCCCUC | 807 |
| KDM1A | AUCGAGGGGCCAGGAGUGAU | 808 |
| KDM1A | GAGGUGGCCGCGCAGCCCGC | 809 |
| KDM1A | CGGGGGCCUGGCGGAACCGC | 810 |
| KDM1A | CGCUGCAGCCGCCGCCGCCG | 811 |
| KDM1A | CUUCUCACCUGUGGGGCACC | 812 |
| KDM1A | AGGUCGGGCCGGGGGCGGUG | 813 |
| KDM1A | AGAGCACCAUGCACUGUGGC | 814 |
| KDM1A | GACUGCUGUGCAGGAACACC | 815 |
| KDM1A | AGGCUCUGGGGUCUCAGGCU | 816 |
| KDM1A | CCCAGCCGAGGUCGGGCCGG | 817 |
| KDM1A | UGAGGUGGCCGCGCAGCCCG | 818 |
| KDM1A | GCGUGCUGAUCCCUGGGCUC | 819 |
| KDM1A | GCACCUGGAAUCGAGGGGCC | 820 |
| KDM1A | CUUCGCCCGCUUGCGCCGGC | 821 |
| KDM1A | UCCUAAAGAGAAAGAUGAAA | 822 |
| KDM1A | AUGCUUGGGGACUGCUGUGC | 823 |
| KDM1A | AAUGAAAAGAAAAACCUUCU | 824 |
| KDM1A | GCGGAACCGCCGGGGUCCGC | 825 |
| KDM1A | GAGGUCGGGCCGGGGGCGGU | 826 |
| KDM1A | AUUAUAGGCUCUGGGGUCUC | 827 |
| KDM1A | UCACUUUCAUUUUCUUCCUC | 828 |
| KDM1A | UCGGAGCCGCCUGCUGUCCC | 829 |
| KDM1A | AGCCGAGGUCGGGCCGGGGG | 830 |
| KDM1A | AAAGCUAGAAGAAAAACUUC | 831 |
| KDM1A | UCCUCAGGUGGGGCUUGAGG | 832 |
| KDM1A | UGCAUCUGUCUCACAUGCUU | 833 |
| KDM1A | GGCGGUUCCGCCAGGCCCCC | 834 |
| KDM1A | CGGCGGUUCCGCCAGGCCCC | 835 |
| KDM1A | ACCGGGACGGAGGCUGGCCC | 836 |
| KDM1A | CACCGCCCCCGGCCCGACCU | 837 |
| KDM1A | GGGGUGAGCUCUUCCUCUUC | 838 |
| KDM1A | CGCCAGGCCCCCGGGGGGCG | 839 |
| KDM1A | ACCAUUUCAUCUUUCUCUUU | 840 |
| KDM1A | GGCCUCGCCCCCCGGGGGCC | 841 |
| KDM1A | UGGGGCUUGAGGGGGUGGUG | 842 |
| KDM1A | GCCGGGGUCCGCAGGGCCUC | 843 |
| KDM1A | GCCCCCGGCCCGACCUCGGC | 844 |
| KDM1A | CUUCUUUUCCUUCUCUGCUU | 845 |
| KDM1A | CCUCCGCGGGCCUCGCCCCC | 846 |
| KDM1A | GGUCGGGCCGGGGGCGGUGG | 847 |
| KDM1A | CUCCGCGGGCCUCGCCCCCC | 848 |
| KDM1A | UGGAAUGGAUGUCACACUUU | 849 |
| KDM1A | CUUCCUCAGGUGGGGCUUGA | 850 |
| KDM1A | GUGGGGCUUGAGGGGGUGGU | 851 |
| KDM1A | GCGGCUGCAGCGGCAGCAAC | 852 |
| KDM1A | CCCCCGGGGGGCGAGGCCCG | 853 |
| KDM1A | UAAUGAAAAGAAAAACCUUC | 854 |
| KDM1A | CGCGGCGGCGGCGGCUGCAG | 855 |
| KDM1A | UCAGGUGGGGCUUGAGGGGG | 856 |
| KDM1A | GGUGGGGCUUGAGGGGGUGG | 857 |
| KDM1A | UGGAAAUGACUAUGAUUUAA | 858 |
| KDM1A | GGGGCUUGAGGGGGUGGUGG | 859 |
| KDM1A | CGAGGUCGGGCCGGGGGCGG | 860 |
| KDM1A | GGCGGCAGCCGCGGCGGCGG | 861 |
| KDM1A | GAAGGCGGCAGCCGCGGCGG | 862 |

### TALEN Gene Editing Systems

[0462] TALENs are produced artificially by fusing a TAL effector DNA binding domain to a DNA cleavage domain. Transcription activator-like effects (TALEs) can be engineered to bind any desired DNA sequence, e.g., a target gene. By combining an engineered TALE with a DNA cleavage domain, a restriction enzyme can be produced which is specific to any desired DNA sequence. These can then be used, for example, as components of gene editing systems, e.g., TALEN gene editing systems, by for example, being introduced into a cell, wherein they can be used for genome editing. Boch (2011) Nature Biotech. 29: 135-6; and Boch et al. (2009) Science 326: 1509-12; Moscou et al. (2009) Science 326: 3501.

[0463] TALEs are proteins secreted by Xanthomonas bacteria. The DNA binding domain contains a repeated, highly conserved 33-34 amino acid sequence, with the exception of the 12th and 13th amino acids. These two positions are highly variable, showing a strong correlation with specific nucleotide recognition. They can thus be engineered to bind to a desired DNA sequence.

[0464] To produce a TALEN, a TALE protein is fused to a nuclease (N), which is, for example, a wild-type or mutated FokI endonuclease. Several mutations to FokI have been made for its use in TALENs; these, for example, improve cleavage specificity or activity. Cermak et al. (2011) Nucl. Acids Res. 39: e82; Miller et al. (2011) Nature Biotech. 29: 143-8; Hockemeyer et al. (2011) Nature Biotech. 29: 731-734; Wood et al. (2011) Science 333: 307; Doyon et al. (2010) Nature Methods 8: 74-79; Szczepek et al. (2007) Nature Biotech. 25: 786-793; and Guo et al. (2010) J. Mol. Biol. 200: 96.

[0465] The FokI domain functions as a dimer, requiring two constructs with unique DNA binding domains for sites in the target genome with proper orientation and spacing. Both the number of amino acid residues between the TALE DNA binding domain and the FokI cleavage domain and the number of bases between the two individual TALEN binding sites appear to be important parameters for achieving high levels of activity. Miller et al. (2011) Nature Biotech. 29: 143-8.

[0466] A TALEN (or pair of TALENs) can be used inside a cell to produce a double-stranded break (DSB). A mutation can be introduced at the break site if the repair mechanisms improperly repair the break via non-homologous end joining. For example, improper repair may introduce a frame shift mutation. Alternatively, foreign DNA can be introduced into the cell along with the TALEN, e.g., DNA encoding a transgene, and depending on the sequences of the foreign DNA and chromosomal sequence, this process can be used to integrate the transgene at or near the site targeted by the TALEN. TALENs specific to a target gene, e.g., LSD1, can be constructed using any method known in the art, including various schemes using modular components. Zhang et al. (2011) Nature Biotech. 29: 149-53; Geibler et al. (2011) PLoS ONE 6: e19509; U.S. Pat. No. 8,420,782; U.S. Pat. No. 8,470,973, the contents of which are hereby incorporated by reference in their entirety.

[0467] Thus, in exemplary embodiments, the genome editing system LSD1 inhibitor is a TALEN gene editing system directed to a sequence of an LSD1 gene, e.g., KDM1A. Such systems are known generally in the art and TALEN genome editing systems specific for LSD1 can be generated using known methods. See, e.g., Boch (2011) Nature Biotech. 29: 135-6; and Boch et al. (2009) Science 326: 1509-12; Moscou et al. (2009) Science 326: 3501; Zhang et al. (2011) Nature Biotech. 29: 149-53; Geibler et al. (2011) PLoS ONE 6: e19509; U.S. Pat. No. 8,420,782; U.S. Pat. No. 8,470,973.

[0468] Zinc Finger Nuclease (ZFN) Gene Editing Systems

[0469] “ZFN” or “Zinc Finger Nuclease” refer to a zinc finger nuclease, an artificial nuclease or pair of nucleases which can be used, e.g., as part of a ZFN gene editing system to modify, e.g., insert or delete, one or more nucleic acids at or near a desired nucleic acid sequence, e.g., desired sequence of an LSD1 gene.

[0470] Like a TALEN, a ZFN comprises a FokI nuclease domain (or derivative thereof) fused to a DNA-binding domain. In the case of a ZFN, the DNA-binding domain comprises one or more zinc fingers. Carroll et al. (2011) Genetics Society of America 188: 773-782; and Kim et al. (1996) Proc. Natl. Acad. Sci. USA 93: 1156-1160.

[0471] A zinc finger is a small protein structural motif stabilized by one or more zinc ions. A zinc finger can comprise, for example, Cys2His2, and can recognize an approximately 3-bp sequence. Various zinc fingers of known specificity can be combined to produce multi-finger polypeptides which recognize about 6, 9, 12, 15 or 18-bp sequences. Various selection and modular assembly techniques are available to generate zinc fingers (and combinations thereof) recognizing specific sequences, including phage display, yeast one-hybrid systems, bacterial one-hybrid and two-hybrid systems, and mammalian cells.

[0472] Like a TALEN, a ZFN must dimerize to cleave DNA. Thus, a pair of ZFNs are required to target non-palindromic DNA sites. The two individual ZFNs must bind opposite strands of the DNA with their nucleases properly spaced apart. Bitinaite et al. (1998) Proc. Natl. Acad. Sci. USA 95: 10570-5.

[0473] Also like a TALEN, a ZFN can create a double-stranded break in the DNA, which can create a frame-shift mutation if improperly repaired, leading to a decrease in the expression and amount of the target gene in a cell. ZFNs can also be used with homologous recombination to mutate the target gene or locus, or to introduce nucleic acid encoding a desired transgene at a site at or near the targeted sequence.

[0474] ZFNs specific to sequences in a target gene can be constructed using any method known in the art. See, e.g., Provasi (2011) Nature Med. 18: 807-815; Torikai (2013) Blood 122: 1341-1349; Cathomen et al. (2008) Mol. Ther. 16: 1200-7; and Guo et al. (2010) J. Mol. Biol. 400: 96; U.S. Patent Publication 2011/0158957; and U.S. Patent Publication 2012/0060230, the contents of which are hereby incorporated by reference in their entirety. In embodiments, The ZFN gene editing system may also comprise nucleic acid encoding one or more components of the ZFN gene editing system.

[0475] Thus, in exemplary embodiments, the genome editing system LSD1 inhibitor is a zinc finger nuclease gene editing system specific for a LSD1 gene, e.g., KDM1A. Such systems are known generally in the art and zinc finger nuclease genome editing systems specific for LSD1 can be generated using known methods. See, e.g., Provasi (2011) Nature Med. 18: 807-815; Torikai (2013) Blood 122: 1341-1349; Cathomen et al. (2008) Mol. Ther. 16: 1200-7; Guo et al. (2010) J. Mol. Biol. 400: 96; U.S. Patent Publication 2011/0158957; and U.S. Patent Publication 2012/0060230.

In an exemplary embodiment, the genome editing system LSD1 inhibitor is a meganuclease system. Such systems are known generally in the art and meganuclease genome editing systems specific for LSD1 can be generated using known methods.

### Small Molecule LSD1 Inhibitors

[0476] In one aspect the LSD1 inhibitor is a small molecule. Exemplary small molecule LSD1 inhibitors are provided below, and additional candidate molecules may be identified by known assays, such as LSD1 binding assays and the assays described herein.

[0477] Useful lysine specific demethylase 1 (LSD1) inhibitors include both irreversible and reversible inhibitors. Reviews describing a variety of reversible and irreversible LSD1 inhibitors were published by Mould, Daniel P., et al., “Reversible Inhibitors of LSD1 as Therapeutic Agents in Acute Myeloid Leukemia: Clinical Significance and Progress to Date,” Med. Res. Rev., 35, No. 3, 586-618, (2015); and Xheng, Yi-Choa, et. al., “A Systematic Review of Histone Lysine-Specific Demethylase 1 and Its Inhibitors” Med. Res. Rev., 35, No. 5, 1032-1071, (2015), incorporated herein by reference. Suitable LSD1 inhibitors are also disclosed in PCT Patent Publication Nos. WO07/021839; WO2010/043721; WO2010/084160; WO2011/035941; WO2011/042217; WO2012/013727; WO2012/034116; WO2012/071469; WO2012/135113; WO2013/057320; WO2013/057322; WO2014/205213; WO2015/031564; WO2015/123408; WO2015/123437; WO2015/123465; and WO2015/156417. Representative examples of irreversible and reversible LSD1 inhibitors are described herein below.

[0478] Exemplary irreversible LSD1 inhibitors include: GSK-LSD1 (trans-racemic) dihydrochloride, rel-N-[(1R,2S)-2-Phenylcyclopropyl]-4-piperidinamine hydrochloride (1:2) (available from Sigma-Aldrich); Tranylcypromine; N-[(1S,2R)-2-phenylcyclopropyl]-4-piperidinemethanamine (GSK2699537, described in PCT publication Nos. WO 2013057320 and WO 2012135113); 4-[[4-[[[(1R,2S)-2-phenylcyclopropyl]amino]methyl]-1-piperidinyl]methyl]-benzoic acid or a pharmaceutically acceptable salt thereof (GSK2879552, described in PCT publication No. WO 2012135113); trans-N1-[(1R,2S)-2-phenylcyclopropyl]-1,4-cyclohexanediamine or a pharmaceutically acceptable salt thereof (ORY-1001, described in PCT publication No. WO 2013057322); rel-1-(4-methyl-1-piperazinyl)-2-[[(1R*,2S*)-2-[4-phenylmethoxy)phenyl]cyclopropyl]amino]ethanone or a pharmaceutically acceptable salt thereof (RN-1, described in PCT Publication No. WO 2010043721); rel-2-[[(1R,2S)-2-[4-[(4-chlorophenyl)methoxy] phenyl]cyclopropyl]amino]-1-(4-methyl-1-piperazinyl)-ethanone or a pharmaceutically acceptable salt thereof (described in PCT Publication No. WO 2010043721); 4′-((1R,2S)-2-Aminocyclopropyl)biphenyl-3-ol or a pharmaceutically acceptable salt thereof (OG-L002, described in PCT Publication No. WO 2012013727); (1S,2R)—N-((2-methoxypyridin-3-yl)methyl)-2-phenylcyclopropan-1-amine (described in PCT Publication No. WO2010/084160) or a pharmaceutically acceptable salt thereof.

[0479] Examplary reversible LSD1 inhibitors include: Namoline (available from ChemBridge, San Diego, Calif.); 3-(4-morpholinylsulfonyl)-benzoic acid, (2E)-2-[1-(5-chloro-2-hydroxyphenyl)ethylidene]hydrazide (SP-2509, described in PCT Publication No. WO 2014205213); 3-[[4-[4-(Aminoiminomethyl)benzoyl]-1-piperazinyl]carbonyl]-5-[[4-(aminoiminomethyl)-1-piperazinyl]methyl]-benzoic acid, methyl ester (CBB-1007, available from DSK Biopharma, Inc., and described in PCT Publication No. WO2012/071469); (R)-4-(5-(pyrrolidin-3-ylmethoxy)-2-(p-tolyl)pyridin-3-yl)benzonitrile (GSK354); N,N-dimethyl-1-((4-(4-(4-(piperidin-4-yl)phenyl)-1H-indazol-1-yl)phenyl)sulfonyl)piperidin-4-amine; 5-(6-chloro-4′-(methylsulfonyl)-[1,1′-biphenyl]-3-yl)-2-(piperazin-1-yl)-1H-pyrrole-3-carbonitrile; and trans-3-(3-amino-2-methylphenyl)-1-(4-hydroxycyclohexyl)-6-methyl-1H-indole-5-carbonitrile; or a pharmaceutically acceptable salt of any of the foregoing.

[0480] Additional exemplary LSD1 inhibitors are provided in Table 3, below.

TABLE 3

| | | LCMS | Also Referred |
|---|---|---|---|
| | | IC50 | to in this |
| Chemical Name | Structure | (uM)* | Application As |
| rel-2-[[(1R,2S)-2-[4-[(4- chlorophenyl)meth- oxy]phenyl]cyclopropyl] amino]-1-(4-methyl- 1-piperazinyl)-ethanone | [chemical structure] | 0.01 | |
| (1S,2R)-N-((2-methoxy- pyridin-3- yl)methyl)-2-phenyl- cyclopropan-1-amine | [chemical structure] | 0.02 | Compound A |
| rel-N-[(1R,2S)-2-Phenyl- cyclopropyl]-4- Piperidinamine hydrochloride (1:2) | [chemical structure] | — | GSK-LSD1; LSD1i-GSK |
| 2-(1R,2S)-2-(4- (Benzyloxy)phenyl)cyclo- propylamino)-1- (4-methylpiperazin- 1-yl)ethanone, HCl | [chemical structure] | — | LSD1i-IV; LSD1i-EMD |
| GSK2699537 | [chemical structure] | 0.0007 | Compound B |
| GSK2879552 | [chemical structure] | — | |
| (R)-4-(5-(pyrrolidin-3-yl- methoxy)-2-(p- tolyl)pyridin-3- yl)benzonitrile | [chemical structure] | 0.03 | GSK354; Compound C |
| N,N-dimethyl-1-((4-(4- (4-(piperidin-4- yl)phenyl)-1H-indazol-1- yl)phenyl)sulfonyl) piperidin-4-amine | [chemical structure] | 0.009 | described in Example 3 |
| 5-(6-chloro-4′-(methyl- sulfonyl)-[1,1′-biphenyl]- 3-yl)-2-(piperazin-1-yl)- 1H-pyrrole-3-carbonitrile | [chemical structure] | 0.012 | described in Example 2 |
| Trans-3-(3-amino- 2-methyl- phenyl)-1-(4-hydroxy- cyclohexyl)-6-methyl- 1H-indole-5-carbonitrile (Described in Example 6) | [chemical structure] | 0.003 | NVS Compound 1; Compound 93 |

*LSD1 IC50 as measured by LCMS.

[0481] Small molecule LSD1 inhibitors useful according to the present invention also include prodrugs, derivatives, pharmaceutically acceptable salts, or analogs thereof of any of the foregoing.

[0482] Small molecule LSD1 inhibitors may be formulated for delivery based on well-established methods in the art based on the particular dosages described herein.

[0483] In embodiments, the LSD1 small molecule inhibitor may be conjugated to an antibody or antigen binding fragment thereof. In an embodiment, the antibody or antigen-binding fragment thereof has specificity for an antigen expressed on the surface of a T cell.

### Protein LSD1 Inhibitors

[0484] In embodiments, the LSD1 inhibitor may be a protein LSD1 inhibitor. In embodiments, the protein LSD1 inhibitor is a dominant negative binding partner of LSD1 (e.g., a histone deacetylase (HDAC) that interacts with LSD1 or other member of the Co-REST or AR co-activator complex), or nucleic acid encoding said dominant negative binding partner of LSD1. In embodiments, the protein LSD1 inhibitor is a dominant negative (e.g., catalytically inactive) LSD1, or nucleic acid encoding said molecule.

### Methods of Preparing Populations of Immune Effector Cells Using LSD1 Inhibitors

[0485] The invention features the use of LSD1 inhibitors in the manufacture of a population of immune effector cells, e.g., engineered to express a CAR molecule, e.g., as described herein. Without being bound by theory, the invention in part rests upon the surprising and unexpected discovery that inhibition of LSD1 in immune effector cells, e.g., T cells, results in a population of immune effector cells, e.g., T cells, with a higher number and/or higher proportion of naive immune effector cells, e.g., T cells, and with improved therapeutic properties. The inhibition of LSD1 in said immune effector cells may occur before and/or concurrently with therapy that includes said cells. Thus, one aspect of the invention relates to compositions for and use of LSD1 inhibitors in the manufacture of immune effector cells, e.g., T cells.

[0486] In one aspect, the invention provides a method of making a population of immune effector cells, which is optionally a population of T cells, including the steps of:

[0487] a) contacting a population of immune effector cells with an LSD1 inhibitor;

thereby making a population of immune effector cells, which is optionally a population of T cells,
wherein the contacting with the LSD1 inhibitor causes one or more of the following to occur:

[0488] 1) an increase in the proportion of naive T cells, e.g., T_{SCM} cells;

[0489] 2) an increase in the number of naive T cells, e.g., T_{SCM} cells;

[0490] 3) a decrease in the number of T_{EM} cells;

[0491] 4) a decrease in the proportion of T_{EM} cells;

[0492] 5) an increase in the proportion of CD45RA+CD62L+ T cells;

[0493] 6) an increase in the number of CD45RA+CD62L+ T cells;

[0494] 7) an increase in the proportion of CD45RA+CCR7+ T cells;

[0495] 8) an increase in the number of CD45RA+CCR7+ T cells;

[0496] 9) a decrease in the proportion of PD-1 positive immune effector cells;

[0497] 10) an increase in the ratio of PD-1 negative immune effector cells/PD-1 positive immune effector cells;

[0498] 11) a decrease in the proportion of PD-1+/Lag3+/Tim3+ immune effector cells;

[0499] 12) an increase in the ratio of PD-1−/Lag3−/Tim3− immune effector cells to PD-1+/Lag3+/Tim3+ immune effector cells;

[0500] 13) an increase in the proliferation of the immune effector cells;

[0501] 14) an increase in the production of cytokines (e.g., IFNg and/or IL-2) from said population of immune effector cells; or

[0502] 15) a combination of two, three, four, five, six, seven, eight, nine, ten, eleven, twelve, thirteen or more (e.g., all) of the above;

optionally, as compared to a non-contacted population of immune effector cells.

[0503] In embodiments, the method further includes the step of b) inserting nucleic acid that encodes the CAR into cells of the population of immune effector cells. In embodiments, the contacting of step a) occurs 1) prior to; 2) concurrently with; 3) after; or 4) both before and after; said inserting of step b). In embodiments, the contacting of step a), and optionally the inserting of step b), is ex vivo.

[0504] In another aspect, the invention provides a method of making a population of immune effector cells, which is optionally a population of T cells, including the steps, optionally in the order listed, of:

[0505] a) providing a population of immune effector cells ex vivo;

[0506] b) contacting a population of immune effector cells ex vivo with an LSD1 inhibitor;

thereby making a population of immune effector cells, which is optionally a population of T cells,
wherein the contacting with the LSD1 inhibitor causes one or more of the following to occur:

[0507] 1) an increase in the proportion of naive T cells, e.g., T_{SCM} cells;

[0508] 2) an increase in the number of naive T cells, e.g., T_{SCM} cells;

[0509] 3) a decrease in the number of T_{EM} cells;

[0510] 4) a decrease in the proportion of T_{EM} cells;

[0511] 5) an increase in the proportion of CD45RA+CD62L+ T cells;

[0512] 6) an increase in the number of CD45RA+CD62L+ T cells;

[0513] 7) an increase in the proportion of CD45RA+CCR7+ T cells;

[0514] 8) an increase in the number of CD45RA+CCR7+ T cells;

[0515] 9) a decrease in the proportion of PD-1 positive immune effector cells;

[0516] 10) an increase in the ratio of PD-1 negative immune effector cells/PD-1 positive immune effector cells;

[0517] 11) a decrease in the proportion of PD-1+/Lag3+/Tim3+ immune effector cells;

[0518] 12) an increase in the ratio of PD-1−/Lag3−/Tim3− immune effector cells to PD-1+/Lag3+/Tim3+ immune effector cells;

[0519] 13) an increase in the proliferation of the immune effector cells;

[0520] 14 an increase in the production of cytokines (e.g., IFNg and/or IL-2) from said population of immune effector cells; or

[0521] 15) a combination of two, three, four, five, six, seven, eight, nine, ten, eleven, twelve, thirteen or more (e.g., all) of the above;

optionally, as compared to a non-contacted population of immune effector cells.

[0522] In embodiments, the method further includes the step of c) inserting nucleic acid that encodes the CAR into cells of the population of immune effector cells. In embodiments, the contacting of step b) occurs 1) prior to; 2) concurrently with; 3) after; or 4) both before and after; said inserting of step c). In embodiments, the contacting of step b), and optionally the inserting of step c), is ex vivo.

[0523] In another aspect, the invention provides a method of making a population of immune effector cells, which is optionally a population of T cells, including the steps, optionally in the order listed, of:

[0524] a) administering to a subject an LSD1 inhibitor;

wherein the administering the LSD1 inhibitor causes one or more of the following to occur in said subject:
[0525] 1) an increase in the proportion of naive T cells, e.g., T_{SCM} cells;
[0526] 2) an increase in the number of naive T cells, e.g., T_{SCM} cells;
[0527] 3) a decrease in the number of T_{EM} cells;
[0528] 4) a decrease in the proportion of T_{EM} cells;
[0529] 5) an increase in the proportion of CD45RA+CD62L+ T cells;
[0530] 6) an increase in the number of CD45RA+CD62L+ T cells;
[0531] 7) an increase in the proportion of CD45RA+CCR7+ T cells;
[0532] 8) an increase in the number of CD45RA+CCR7+ T cells;
[0533] 9) a decrease in the proportion of PD-1 positive immune effector cells;
[0534] 10) an increase in the ratio of PD-1 negative immune effector cells/PD-1 positive immune effector cells;
[0535] 11) a decrease in the proportion of PD-1+/Lag3+/Tim3+ immune effector cells;
[0536] 12) an increase in the ratio of PD-1−/Lag3−/Tim3− immune effector cells to PD-1+/Lag3+/Tim3+ immune effector cells;
[0537] 13) an increase in the proliferation of the immune effector cells;
[0538] 14) an increase in the production of cytokines (e.g., IFNg and/or IL-2) from said population of immune effector cells; or
[0539] 15) a combination of two, three, four, five, six, seven, eight, nine, ten, eleven, twelve, thirteen or more (e.g., all) of the above;
   optionally, as compared to a population of immune effector cells from a non-administered subject;
[0540] b) providing a population of immune effector cells from said subject ex vivo;
   thereby making a population of immune effector cells, which is optionally a population of T cells. In embodiments, the method further includes the step of c) inserting nucleic acid that encodes the CAR into cells of the population of immune effector cells.

[0541] In another aspect, the invention provides a method of making a population of immune effector cells, which is optionally a population of T cells, including the steps, optionally in the order listed, of:

[0542] a) administering to a subject an LSD1 inhibitor;

[0543] b) providing a population of immune effector cells from said subject ex vivo;

[0544] c) contacting a population of immune effector cells ex vivo with an LSD1 inhibitor;

thereby making a population of immune effector cells, which is optionally a population of T cells,
wherein one or more of the following occurs:
[0545] 1) an increase in the proportion of naive T cells, e.g., T_{SCM} cells;
[0546] 2) an increase in the number of naive T cells, e.g., T_{SCM} cells;
[0547] 3) a decrease in the number of T_{EM} cells;
[0548] 4) a decrease in the proportion of T_{EM} cells;
[0549] 5) an increase in the proportion of CD45RA+CD62L+ T cells;
[0550] 6) an increase in the number of CD45RA+CD62L+ T cells;
[0551] 7) an increase in the proportion of CD45RA+CCR7+ T cells;
[0552] 8) an increase in the number of CD45RA+CCR7+ T cells;
[0553] 9) a decrease in the proportion of PD-1 positive immune effector cells;
[0554] 10) an increase in the ratio of PD-1 negative immune effector cells/PD-1 positive immune effector cells;
[0555] 11) a decrease in the proportion of PD-1+/Lag3+/Tim3+ immune effector cells;
[0556] 12) an increase in the ratio of PD-1−/Lag3−/Tim3− immune effector cells to PD-1+/Lag3+/Tim3+ immune effector cells;
[0557] 13) an increase in the proliferation of the immune effector cells;
[0558] 14 an increase in the production of cytokines (e.g., IFNg and/or IL-2) from said population of immune effector cells; or
[0559] 15) a combination of two, three, four, five, six, seven, eight, nine, ten, eleven, twelve, thirteen or more (e.g., all) of the above;
   optionally, as compared to a non-contacted and non-administered population of immune effector cells.

[0560] In embodiments, the method further includes the step of d) inserting nucleic acid that encodes the CAR into cells of the population of immune effector cells. In embodiments, the contacting of step c) occurs 1) prior to; 2) concurrently with; 3) after; or 4) both before and after; said inserting of step d).

[0561] In aspects the administration of the LSD1 inhibitor to the subject prior to collection of the population of immune effector cells from said subject may be of sufficient time and/or at a sufficient dose so that one or more of the following occurs:
[0562] 1) an increase in the proportion of naive T cells, e.g., T_{SCM} cells;
[0563] 2) an increase in the number of naive T cells, e.g., T_{SCM} cells;
[0564] 3) a decrease in the number of T_{EM} cells;
[0565] 4) a decrease in the proportion of T_{EM} cells;
[0566] 5) an increase in the proportion of CD45RA+CD62L+ T cells;
[0567] 6) an increase in the number of CD45RA+CD62L+ T cells;
[0568] 7) an increase in the proportion of CD45RA+CCR7+ T cells;
[0569] 8) an increase in the number of CD45RA+CCR7+ T cells;
[0570] 9) a decrease in the proportion of PD-1 positive immune effector cells;
[0571] 10) an increase in the ratio of PD-1 negative immune effector cells/PD-1 positive immune effector cells;
[0572] 11) a decrease in the proportion of PD-1+/Lag3+/Tim3+ immune effector cells;
[0573] 12) an increase in the ratio of PD-1−/Lag3−/Tim3− immune effector cells to PD-1+/Lag3+/Tim3+ immune effector cells;
[0574] 13) an increase in the proliferation of the immune effector cells;
[0575] 14) an increase in the production of cytokines (e.g., IFNg and/or IL-2) from said population of immune effector cells; or
[0576] 15) a combination of two, three, four, five, six, seven, eight, nine, ten, eleven, twelve, thirteen or more (e.g., all) of the above;
   optionally, as compared to non-administered population of immune effector cells. The assays described herein may be utilized in order to determine the proper dose and or time of administration. In embodiments, the LSD1 inhibitor is administered for a period of at least 1 day prior to collection of the population of immune effector cells from said subject. In embodiments, the LSD1 inhibitor is administered for a period of at least 2 days prior to collection of the population of immune effector cells from said subject. In embodiments, the LSD1 inhibitor is administered for a period of at least 3 days prior to collection of the population of immune effector cells from said subject. In embodiments, the LSD1 inhibitor is administered for a period of at least 4 days prior to collection of the population of immune effector cells from said subject. In embodiments, the LSD1 inhibitor is administered for a period of at least 5 days prior to collection of the population of immune effector cells from said subject. In embodiments, the LSD1 inhibitor is administered for a period of at least 6 days prior to collection of the population of immune effector cells from said subject. In embodiments, the LSD1 inhibitor is administered for a period of at least 7 days prior to collection of the population of immune effector cells from said subject. In embodiments, the LSD1 inhibitor is administered for a period of at least a week or weeks prior to collection of the population of immune effector cells from said subject.

[0577] In embodiments, the administration of the LSD1 inhibitor to the subject continues after collection of the immune effector cells from said subject, e.g., continues for a period of 1, 2, 3, 4, 5, 6, 7, 8, 9, 10, 11, 12, 13, 14, 15, 16, 17, 18, 19, 20 or more days after collection of the immune effector cells, e.g., continues at least until the immune effector cells (modified ex vivo) are administered back to the subject, e.g., continues past the time when the immune effector cells (modified ex vivo) are administered back to the subject.

[0578] In aspects the contacting (e.g., ex vivo) of the LSD1 inhibitor to the population of immune effector cells may be of sufficient time and/or at a sufficient dose so that one or more of the following occurs:
[0579] 1) an increase in the proportion of naive T cells, e.g., T_{SCM} cells;
[0580] 2) an increase in the number of naive T cells, e.g., T_{SCM} cells;
[0581] 3) a decrease in the number of T_{EM} cells;
[0582] 4) a decrease in the proportion of T_{EM} cells;
[0583] 5) an increase in the proportion of CD45RA+CD62L+ T cells;
[0584] 6) an increase in the number of CD45RA+CD62L+ T cells;
[0585] 7) an increase in the proportion of CD45RA+CCR7+ T cells;
[0586] 8) an increase in the number of CD45RA+CCR7+ T cells;
[0587] 9) a decrease in the proportion of PD-1 positive immune effector cells;
[0588] 10) an increase in the ratio of PD-1 negative immune effector cells/PD-1 positive immune effector cells;
[0589] 11) a decrease in the proportion of PD-1+/Lag3+/Tim3+ immune effector cells;
[0590] 12) an increase in the ratio of PD-1−/Lag3−/Tim3− immune effector cells to PD-1+/Lag3+/Tim3+ immune effector cells;
[0591] 13) an increase in the proliferation of the immune effector cells;
[0592] 14 an increase in the production of cytokines (e.g., IFNg and/or IL-2) from said population of immune effector cells; or
[0593] 15) a combination of two, three, four, five, six, seven, eight, nine, ten, eleven, twelve, thirteen or more (e.g., all) of the above;

[0594] optionally, as compared to non-contacted population of immune effector cells. The assays described herein may be utilized in order to determine the proper dose and or time of administration. In embodiments, the population of immune effector cells is contacted with an LSD1 inhibitor for a period of at least 1 day. In embodiments, the population of immune effector cells is contacted with an LSD1 inhibitor for a period of at least 2 days. In embodiments, the population of immune effector cells is contacted with an LSD1 inhibitor for a period of at least 3 days. In embodiments, the population of immune effector cells is contacted with an LSD1 inhibitor for a period of at least 4 days. In embodiments, the population of immune effector cells is contacted with an LSD1 inhibitor for a period of at least 5 days. In embodiments, the population of immune effector cells is contacted with an LSD1 inhibitor for a period of at least 6 days. In embodiments, the population of immune effector cells is contacted with an LSD1 inhibitor for a period of at least 7 days. In embodiments, the population of immune effector cells is contacted with an LSD1 inhibitor for a period of at least a week or weeks. In embodiments, media containing the LSD1 inhibitor is replaced with fresh media containing the LSD1 inhibitor, e.g., once, twice, three times, 4 times, 5 times, 6 times, 7 times, or more than 7 times (e.g., every day or every other day) during the time the immune effector cells are ex vivo. The concentration of LSD1 inhibitor can be adjusted in order that the desired effect occurs, and may be, for example, about 0.001 nM to about 10 mM, e.g., about 0.01 nM to about 1 mM, e.g., about 0.1 nM to about 100 uM, e.g., from about 1 nM to about 100 uM, e.g., from about 10 nM to about 100 uM, e.g., from about 100 nM to about 10 uM, e.g., from about 0.001 nM to about 100 nM, or e.g., from about 0.1 uM to about 10 uM. In embodiments, the concentration of LSD1 inhibitor is 100 nM. In embodiments, the concentration of LSD1 inhibitor is about 100 uM. In embodiments, the concentration of LSD1 inhibitor is 200 nM. In embodiments, the concentration of LSD1 inhibitor is about 200 uM.

[0595] In another aspect the invention provides a composition for use in ex vivo manufacturing a population of immune effector cells, that includes an LSD1 inhibitor, e.g., a small molecule LSD1 inhibitor. In embodiments, the composition includes the small molecule LSD1 inhibitor at a concentration of from about 0.001 nM to about 10 mM, e.g., from about 0.001 nM to about 100 nM, or, e.g., from about 0.1 uM to about 10 uM.

[0596] In embodiments involving immune effector cells engineered to express a CAR molecule, e.g., as described herein, it is understood that the method may further include any of the aspects, steps or features described below in the section relating to Chimeric Antigen Receptors.

Methods of Treatment with Immune Effector Cells and LSD1 Inhibitors

[0597] The invention features the use of LSD1 inhibitors in the treatment of a disease, e.g., cancer, in a patient wherein such treatment is in combination with administration of a population of immune effector cells, e.g., immune effector cells engineered to express a CAR molecule, e.g., as described herein. Without being bound by theory, the invention in part rests upon the surprising and unexpected discovery that inhibition of LSD1 in immune effector cells, e.g., T cells, results in a population of immune effector cells, e.g., T cells, with a higher number and/or higher proportion of naive immune effector cells, e.g., T cells, and with improved therapeutic properties. Thus, one aspect of the invention provides treatment of a disease, e.g., a cancer, with a combination of a population of immune effector cells, e.g., engineered to express a CAR molecule, e.g., as described herein, and an LSD1 inhibitor.

[0598] In one aspect, the invention features a method of treating a subject that includes administering an LSD1 inhibitor to the subject, wherein said subject has received, is receiving or is about to receive a population of immune effector cells engineered to express a chimeric antigen receptor (CAR). In embodiments, the method includes administering to said subject an LSD1 inhibitor and a population of immune effector cells engineered to express a CAR molecule, e.g., as described herein. In embodiments, the LSD1 inhibitor is administered before the population of immune effector cells engineered to express a CAR molecule, e.g., as described herein, and wherein said administration of the LSD1 inhibitor is continued for a period of time after the administration of the population of immune effector cells engineered to express a CAR molecule, e.g., as described herein. In other embodiments, the administration of the LSD1 inhibitor after the administration of the population of immune effector cells engineered to express a CAR molecule, e.g., as described herein is in an amount sufficient to increase an anti-tumor effect of the population of immune effector cells engineered to express a CAR molecule, e.g., as described herein relative to an equivalent population of immune effector cells engineered to express a CAR molecule, e.g., as described herein administered in the absence of said LSD1 inhibitor.

[0599] In another aspect, the invention features a method of increasing the therapeutic efficacy in a subject of a population of immune effector cells engineered to express a CAR molecule, e.g., as described herein, e.g., a CAR19 (e.g., CTL019), including a step of decreasing the activity or expression of LSD1 in said cell, at least transiently. In embodiments, the step of decreasing the activity or expression of LSD1 in said cell includes contacting the cell with an LSD1 inhibitor. In embodiments, the contacting is done ex vivo. In embodiments, the contacting is done in vivo (e.g., the population of immune effector cells and the LSD1 inhibitor are coadministered to the subject).

[0600] In embodiments of any of the forgoing aspect, the administration or the contacting of the LSD1 inhibitor results in:
[0601] 1) an increase in the proportion of naive T cells, e.g., T_{SCM} cells;
[0602] 2) an increase in the number of naive T cells, e.g., T_{SCM} cells;
[0603] 3) a decrease in the number of T_{EM} cells;
[0604] 4) a decrease in the proportion of T_{EM} cells;
[0605] 5) an increase in the proportion of CD45RA+CD62L+ T cells;
[0606] 6) an increase in the number of CD45RA+CD62L+ T cells;
[0607] 7) an increase in the proportion of CD45RA+CCR7+ T cells;
[0608] 8) an increase in the number of CD45RA+CCR7+ T cells;
[0609] 9) a decrease in the proportion of PD-1 positive immune effector cells;
[0610] 10) an increase in the ratio of PD-1 negative immune effector cells/PD-1 positive immune effector cells;
[0611] 11) a decrease in the proportion of PD-1+/Lag3+/Tim3+ immune effector cells;
[0612] 12) an increase in the ratio of PD-1−/Lag3−/Tim3− immune effector cells to PD-1+/Lag3+/Tim3+ immune effector cells;
[0613] 13) an increase in the proliferation of the immune effector cells;
[0614] 14) an increase in the production of cytokines (e.g., IFNg and/or IL-2) from said population of immune effector cells; or
[0615] 15) a combination of two, three, four, five, six, seven, eight, nine, ten, eleven, twelve, thirteen or more (e.g., all) of the above.

[0616] In embodiments, the effect is as compared to cells not contacted with the LSD1 inhibitor. In embodiments, the effect is as compared to cells of the same subject not contacted with the LSD1 inhibitor.

[0617] In another aspect, the invention provides a method of treating a subject, that includes:

[0618] a) administering an LSD1 inhibitor to said subject;

[0619] b) collecting a population of immune effector cells from said subject after said administration of the LSD1 inhibitor;

[0620] c) providing said population of immune effector cells ex vivo;

[0621] d) contacting said ex vivo population of immune effector cells with the LSD1 inhibitor, wherein the contacting with the LSD1 inhibitor causes one or more of the following to occur:
[0622] 1) an increase in the proportion of naive T cells, e.g., T_{SCM} cells;
[0623] 2) an increase in the number of naive T cells, e.g., T_{SCM} cells;
[0624] 3) a decrease in the number of T_{EM} cells;
[0625] 4) a decrease in the proportion of T_{EM} cells;
[0626] 5) an increase in the proportion of CD45RA+CD62L+ T cells;
[0627] 6) an increase in the number of CD45RA+CD62L+ T cells;
[0628] 7) an increase in the proportion of CD45RA+CCR7+ T cells;
[0629] 8) an increase in the number of CD45RA+CCR7+ T cells;
[0630] 9) a decrease in the proportion of PD-1 positive immune effector cells;
[0631] 10) an increase in the ratio of PD-1 negative immune effector cells/PD-1 positive immune effector cells;
[0632] 11) a decrease in the proportion of PD-1+/Lag3+/Tim3+ immune effector cells;
[0633] 12) an increase in the ratio of PD-1−/Lag3−/Tim3− immune effector cells to PD-1+/Lag3+/Tim3+ immune effector cells;
[0634] 13) an increase in the proliferation of the immune effector cells;
[0635] 14) an increase in the production of cytokines (e.g., IFNg and/or IL-2) from said population of immune effector cells; or
[0636] 15) a combination of two, three, four, five, six, seven, eight, nine, ten, eleven, twelve, thirteen or more (e.g., all) of the above;

[0637] optionally, as compared to a non-contacted ex vivo population of immune effector cells; and

[0638] e) administering the population of immune effector cells to the subject.

[0639] In embodiments, step of e) further includes administering the LSD1 inhibitor to the subject. In embodiments, the method further includes the step of inserting nucleic acid that encodes a CAR into cells of the ex vivo population of immune effector cells.

[0640] In another aspect the invention provides a method of treating a subject in need thereof, including administering to said subject an effective amount of the population of immune effector cells of any of the previous aspects and embodiments. In embodiments, the method further includes administering to said subject an LSD1 inhibitor. In embodiments, the subject receives a pre-treatment of the LSD1 inhibitor, prior to the administration of the population of immune effector cells. In embodiments, the subject receives concurrent treatment with an LSD1 inhibitor and the population of immune effector cells. In embodiments, the subject receives treatment with an LSD1 inhibitor after administration of the population of immune effector cells; In embodiments, the subject receives a combination of any of the foregoing.

[0641] In an aspect, including in the previous aspects relating to methods of treatment, the invention relates to methods of treating a subject, wherein the subject has a disease associated with expression of a tumor antigen, e.g., a proliferative disease, a precancerous condition, a cancer, and a non-cancer related indication associated with expression of the tumor antigen. In embodiments, the cancer is a hematologic cancer chosen from one or more of chronic lymphocytic leukemia (CLL), acute leukemias, acute lymphoid leukemia (ALL), acute myeloid leukemia (AML), B-cell acute lymphoid leukemia (B-ALL), T-cell acute lymphoid leukemia (T-ALL), chronic myelogenous leukemia (CML), B cell prolymphocytic leukemia, blastic plasmacytoid dendritic cell neoplasm, Burkitt's lymphoma, diffuse large B cell lymphoma, follicular lymphoma, hairy cell leukemia, small cell- or a large cell-follicular lymphoma, malignant lymphoproliferative conditions, MALT lymphoma, mantle cell lymphoma, marginal zone lymphoma, multiple myeloma, myelodysplasia and myelodysplastic syndrome, non-Hodgkin's lymphoma, Hodgkin's lymphoma, plasmablastic lymphoma, plasmacytoid dendritic cell neoplasm, Waldenstrom macroglobulinemia, or pre-leukemia. In embodiments, the cancer is selected from the group consisting of colon cancer, rectal cancer, renal-cell carcinoma, liver cancer, non-small cell carcinoma of the lung, cancer of the small intestine, cancer of the esophagus, melanoma, bone cancer, pancreatic cancer, skin cancer, cancer of the head or neck, cutaneous or intraocular malignant melanoma, uterine cancer, ovarian cancer, rectal cancer, cancer of the anal region, stomach cancer, testicular cancer, uterine cancer, carcinoma of the fallopian tubes, carcinoma of the endometrium, carcinoma of the cervix, carcinoma of the vagina, carcinoma of the vulva, Hodgkin's Disease, non-Hodgkin's lymphoma, cancer of the endocrine system, cancer of the thyroid gland, cancer of the parathyroid gland, cancer of the adrenal gland, sarcoma of soft tissue, cancer of the urethra, cancer of the penis, solid tumors of childhood, cancer of the bladder, cancer of the kidney or ureter, carcinoma of the renal pelvis, neoplasm of the central nervous system (CNS), primary CNS lymphoma, tumor angiogenesis, spinal axis tumor, brain stem glioma, pituitary adenoma, Kaposi's sarcoma, epidermoid cancer, squamous cell cancer, T-cell lymphoma, environmentally induced cancers, combinations of said cancers, and metastatic lesions of said cancers.

[0642] In embodiments involving immune effector cells engineered to express a CAR molecule, e.g., as described herein, it is understood that the treatment method may further include any of the steps, aspects or features described below in the section relating to Chimeric Antigen Receptors.

### Cells

[0643] As will be readily apparent to the skilled artisan from this disclosure, the invention relates to cells comprising LSD1 inhibitors. The invention further includes cells that have been contacted with an LSD1 inhibitor, e.g., for a period of time and/or at a dose sufficient for one or more of the following to occur:
[0644] 1) an increase in the proportion of naive T cells, e.g., T_{SCM} cells;
[0645] 2) an increase in the number of naive T cells, e.g., T_{SCM} cells;
[0646] 3) a decrease in the number of T_{EM} cells;
[0647] 4) a decrease in the proportion of T_{EM} cells;
[0648] 5) an increase in the proportion of CD45RA+CD62L+ T cells;
[0649] 6) an increase in the number of CD45RA+CD62L+ T cells;
[0650] 7) an increase in the proportion of CD45RA+CCR7+ T cells;
[0651] 8) an increase in the number of CD45RA+CCR7+ T cells;
[0652] 9) a decrease in the proportion of PD-1 positive immune effector cells;
[0653] 10) an increase in the ratio of PD-1 negative immune effector cells/PD-1 positive immune effector cells;
[0654] 11) a decrease in the proportion of PD-1+/Lag3+/Tim3+ immune effector cells;
[0655] 12) an increase in the ratio of PD-1−/Lag3−/Tim3− immune effector cells to PD-1+/Lag3+/Tim3+ immune effector cells;
[0656] 13) an increase in the proliferation of the immune effector cells;
[0657] 14 an increase in the production of cytokines (e.g., IFNg and/or IL-2) from said population of immune effector cells; or
[0658] 15) a combination of two, three, four, five, six, seven, eight, nine, ten, eleven, twelve, thirteen or more (e.g., all) of the above;
   optionally, relative to un-contacted cells.

[0659] The invention further relates to cells made by any of the methods described herein.

[0660] The cells are preferably immune effector cells. In an embodiment, the cells are T cells. In an embodiment, the cells are NK cells. In embodiments, the invention relates to a population of cells of the invention, e.g., a population of immune effector cells of the invention. In embodiments, the population of cells of the invention comprises cells of the type indicated, and may comprise other types (e.g., a population of immune effector cells, e.g., T cells, engineered to express a CAR molecule, e.g., as described herein, may include T cells engineered to express a CAR molecule as well as T cells (or other cell types) that have not been engineered to express a CAR molecule). In embodiments, the population of cells of the invention consists essentially of cells of the type indicated. In embodiments, the population of cells of the invention is substantially free of other cell types. In embodiments, the population of cells of the invention consists of the indicated cell type.

[0661] In any of the foregoing aspects and embodiments, the cells and/or population of cells are or include immune effector cells, e.g., the population of immune effector cells includes, e.g., consists of, T cells or NK cells. In embodiments the cells are T cells, e.g., CD8+ T cells, CD4+ T cells, or a combination thereof. In embodiments the cells are NK cells.

[0662] In embodiments the cells are human cells. In embodiments, the cells are autologous, e.g., to the subject to be administered the cells. In embodiments, the cells are allogeneic, e.g., to the subject to be administered the cells.

[0663] In embodiments, the cells are, or include, cells engineered to express a CAR molecule, e.g., as described herein. Additional features and/or aspects of the cells useful in the invention are described below in the section entitled Chimeric Antigen Receptors.

[0664] In one embodiment, the immune effector cells expressing a CAR molecule, e.g., a CAR molecule described herein, are obtained from a subject that has received an LSD1 inhibitor. In an embodiment, the population of immune effector cells, e.g., T cells, to be engineered to express a CAR molecule, are harvested after a sufficient time, or after sufficient dosing of the LSD1 inhibitor, such that the level of PD1 negative immune effector cells, e.g., T cells, or the ratio of PD1 negative immune effector cells, e.g., T cells/PD1 positive immune effector cells, e.g., T cells, in the subject or harvested from the subject has been, at least transiently, increased.

[0665] In other embodiments, a population of immune effector cells, e.g., T cells, which have, or will be engineered to express a CAR molecule, e.g., as described herein, can be treated ex vivo by contact with an amount of an LSD1 inhibitor that increases the number of PD1 negative immune effector cells, e.g., T cells or increases the ratio of PD1 negative immune effector cells, e.g., T cells/PD1 positive immune effector cells, e.g., T cells.

[0666] In an embodiment, the NK cells are obtained from the subject. In another embodiment, the NK cells are an NK cell line, e.g., NK-92 cell line (Conkwest).

[0667] In an embodiment, immune effector cells, e.g., T cells, are obtained or harvested from a subject after administration to the subject of an LSD1 inhibitor.

[0668] In an embodiment, the immune effector cells, e.g., T cells, are collected after an increase in the number of PD1 negative immune effector, e.g., T cells, or after an increase in the ratio of PD1 negative immune effector, e.g., T cells/PD1 positive immune effector, e.g., T cells, has occurred.

[0669] In an embodiment, the immune effector cells, e.g., T cells, are collected after an increase in the number of naive T cells has occurred.

[0670] In an embodiment, the immune effector cells, e.g., T cells, are collected after one or more of the following:
[0671] 1) an increase in the proportion of naive T cells, e.g., T_{SCM} cells;
[0672] 2) an increase in the number of naive T cells, e.g., T_{SCM} cells;
[0673] 3) a decrease in the number of T_{EM} cells;
[0674] 4) a decrease in the proportion of T_{EM} cells;
[0675] 5) an increase in the proportion of CD45RA+CD62L+ T cells;
[0676] 6) an increase in the number of CD45RA+CD62L+ T cells;
[0677] 7) an increase in the proportion of CD45RA+CCR7+ T cells;
[0678] 8) an increase in the number of CD45RA+CCR7+ T cells;
[0679] 9) a decrease in the proportion of PD-1 positive immune effector cells;
[0680] 10) an increase in the ratio of PD-1 negative immune effector cells/PD-1 positive immune effector cells;
[0681] 11) a decrease in the proportion of PD-1+/Lag3+/Tim3+ immune effector cells;
[0682] 12) an increase in the ratio of PD-1−/Lag3−/Tim3− immune effector cells to PD-1+/Lag3+/Tim3+ immune effector cells;
[0683] 13) an increase in the proliferation of the immune effector cells;
[0684] 14) an increase in the production of cytokines (e.g., IFNg and/or IL-2) from said population of immune effector cells; or
[0685] 15) a combination of two, three, four, five, six, seven, eight, nine, ten, eleven, twelve, thirteen or more (e.g., all) of the above;

[0686] The increase or decrease can be transient. The increase or decrease can be permanent. The increase or decrease can be as compared with a standard, e.g., cells from an untreated subject.

[0687] In embodiment, immune effector cells, e.g., T cells, are contacted, ex vivo (after removal from the subject or a donor and before introduction into the subject), with an LSD1 inhibitor.

[0688] In an embodiment, the contact is at a level which results in an increase in the number of PD1 negative immune effector, e.g., T cells, or an increase in the ratio of PD1 negative immune effector cells, e.g., T cells/PD1 positive immune effector, e.g., T cells.

[0689] In an embodiment, immune effector cells, e.g., T cells, are contacted, ex vivo (after removal from the subject or a donor and before introduction into the subject), with an LSD1 inhibitor, at a level which results in an increase in the number of naive T cells.

[0690] In an embodiment, immune effector cells, e.g., T cells, are contacted, ex vivo (after removal from the subject or a donor and before introduction into the subject), with an LSD1 inhibitor, at a level which results in one or more of the following:
[0691] 1) an increase in the proportion of naive T cells, e.g., T_{SCM} cells;
[0692] 2) an increase in the number of naive T cells, e.g., T_{SCM} cells;
[0693] 3) a decrease in the number of T_{EM} cells;
[0694] 4) a decrease in the proportion of T_{EM} cells;
[0695] 5) an increase in the proportion of CD45RA+CD62L+ T cells;
[0696] 6) an increase in the number of CD45RA+CD62L+ T cells;
[0697] 7) an increase in the proportion of CD45RA+CCR7+ T cells;
[0698] 8) an increase in the number of CD45RA+CCR7+ T cells;
[0699] 9) a decrease in the proportion of PD-1 positive immune effector cells;
[0700] 10) an increase in the ratio of PD-1 negative immune effector cells/PD-1 positive immune effector cells;
[0701] 11) a decrease in the proportion of PD-1+/Lag3+/Tim3+ immune effector cells;
[0702] 12) an increase in the ratio of PD-1−/Lag3−/Tim3− immune effector cells to PD-1+/Lag3+/Tim3+ immune effector cells;
[0703] 13) an increase in the proliferation of the immune effector cells;
[0704] 14) an increase in the production of cytokines (e.g., IFNg and/or IL-2) from said population of immune effector cells; or
[0705] 15) a combination of two, three, four, five, six, seven, eight, nine, ten, eleven, twelve, thirteen or more (e.g., all) of the above;

[0706] The increase or decrease can be transient. The increase or decrease can be permanent. The increase or decrease can be as compared with a standard, e.g., cells from an untreated subject.

[0707] In an embodiment a preparation of T cells is evaluated for the level of increase in the number of PD1 negative immune effector, e.g., T cells, or an increase in the ratio of PD1 negative immune effector cells, e.g., T cells/PD1 positive immune effector, e.g., T cells.

[0708] In an embodiment, a preparation of T cells is evaluated for the level of increase in the number of naive T cells. In an embodiment, a preparation of T cells is evaluated for one or more of the following:
[0709] 1) an increase in the proportion of naive T cells, e.g., T_{SCM} cells;
[0710] 2) an increase in the number of naive T cells, e.g., T_{SCM} cells;
[0711] 3) a decrease in the number of T_{EM} cells;
[0712] 4) a decrease in the proportion of T_{EM} cells;
[0713] 5) an increase in the proportion of CD45RA+CD62L+ T cells;
[0714] 6) an increase in the number of CD45RA+CD62L+ T cells;
[0715] 7) an increase in the proportion of CD45RA+CCR7+ T cells;
[0716] 8) an increase in the number of CD45RA+CCR7+ T cells;
[0717] 9) a decrease in the proportion of PD-1 positive immune effector cells;
[0718] 10) an increase in the ratio of PD-1 negative immune effector cells/PD-1 positive immune effector cells;
[0719] 11) a decrease in the proportion of PD-1+/Lag3+/Tim3+ immune effector cells;
[0720] 12) an increase in the ratio of PD-1−/Lag3−/Tim3− immune effector cells to PD-1+/Lag3+/Tim3+ immune effector cells;
[0721] 13) an increase in the proliferation of the immune effector cells;
[0722] 14) an increase in the production of cytokines (e.g., IFNg and/or IL-2) from said population of immune effector cells; or
[0723] 15) a combination of two, three, four, five, six, seven, eight, nine, ten, eleven, twelve, thirteen or more (e.g., all) of the above;

[0724] The increase or decrease can be transient. The increase or decrease can be permanent. The increase or decrease can be as compared with a standard, e.g., cells of an untreated subject.

### Pharmaceutical Compositions: LSD1 Inhibitors

[0725] In one aspect, the present invention relates to pharmaceutical compositions comprising an LSD1 inhibitor, e.g., an LSD1 inhibitor as described herein, formulated for use as a medicament.

[0726] In one aspect, the present invention relates to pharmaceutical compositions comprising an LSD1 inhibitor, e.g., an LSD1 inhibitor as described herein, formulated for use in the manufacture of a population of immune effector cells.

[0727] In one aspect, the present invention relates to pharmaceutical compositions comprising an LSD1 inhibitor, e.g., an LSD1 inhibitor as described herein, formulated for use in combination with CAR cells described herein.

[0728] In some embodiments, the LSD1 inhibitor is formulated for administration in combination with another agent, in addition to a CAR cell, e.g., as described herein.

[0729] In general, compounds of the invention will be administered in therapeutically effective amounts as described above via any of the usual and acceptable modes known in the art, either singly or in combination with one or more therapeutic agents.

[0730] The pharmaceutical formulations may be prepared using conventional dissolution and mixing procedures. For example, the bulk drug substance (e.g., an LSD1 inhibitor or stabilized form of the compound (e.g., complex with a cyclodextrin derivative or other known complexation agent) is dissolved in a suitable solvent in the presence of one or more of the excipients described herein. The LSD1 inhibitor is typically formulated into pharmaceutical dosage forms to provide an easily controllable dosage of the drug and to give the patient an elegant and easily handleable product.

[0731] Compounds of the invention can be administered as pharmaceutical compositions by any conventional route, in particular enterally, e.g., orally, e.g., in the form of tablets or capsules, or parenterally, e.g., in the form of injectable solutions or suspensions, topically, e.g., in the form of lotions, gels, ointments or creams, or in a nasal or suppository form. Where an LSD1 inhibitor is administered in combination with (either simultaneously with or separately from) another agent as described herein, in one aspect, both components can be administered by the same route (e.g., parenterally). Alternatively, another agent may be administered by a different route relative to the LSD1 inhibitor. For example, an LSD1 inhibitor may be administered orally and the other agent may be administered parenterally. Pharmaceutical compositions comprising an LSD1 inhibitor in free form or in a pharmaceutically acceptable salt form in association with at least one pharmaceutically acceptable carrier or diluent can be manufactured in a conventional manner by mixing, granulating or coating methods. For example, oral compositions can be tablets or gelatin capsules comprising the active ingredient together with a) diluents, e.g., lactose, dextrose, sucrose, mannitol, sorbitol, cellulose and/or glycine; b) lubricants, e.g., silica, talcum, stearic acid, its magnesium or calcium salt and/or polyethyleneglycol; for tablets also c) binders, e.g., magnesium aluminum silicate, starch paste, gelatin, tragacanth, methylcellulose, sodium carboxymethylcellulose and or polyvinylpyrrolidone; if desired d) disintegrants, e.g., starches, agar, alginic acid or its sodium salt, or effervescent mixtures; and/or e) absorbents, colorants, flavors and sweeteners. Oral formulations can also comprise the active ingredient along with 20-60% Eudragit EPO, Hydroxypropyl cellulose EF, Hydroxypropyl methylcellulose, or Kollidon VA64, and up to 5% of pluronic F68, Cremophor EL, or Gelucire 44/14. Injectable compositions can be aqueous isotonic solutions or suspensions, and suppositories can be prepared from fatty emulsions or suspensions. The compositions may be sterilized and/or contain adjuvants, such as preserving, stabilizing, wetting or emulsifying agents, solution promoters, salts for regulating the osmotic pressure and/or buffers. In addition, they may also contain other therapeutically valuable substances. Suitable formulations for transdermal applications include an effective amount of a compound of the present invention with a carrier. A carrier can include absorbable pharmacologically acceptable solvents to assist passage through the skin of the host. For example, transdermal devices are in the form of a bandage comprising a backing member, a reservoir containing the compound optionally with carriers, optionally a rate controlling barrier to deliver the compound to the skin of the host at a controlled and predetermined rate over a prolonged period of time, and means to secure the device to the skin. Matrix transdermal formulations may also be used. In a further aspect, the LSD1 inhibitors described herein may be administered via a microneedle patch. Microneedle based drug delivery is well known in the art (See, e.g., U.S. Pat. No. 8,162,901) and these technologies and methods may be adapted by one of skill in the art for administration of an LSD1 inhibitor as described herein. Suitable formulations for topical application, e.g., to the skin and eyes, are preferably aqueous solutions, ointments, creams or gels well-known in the art. Such formulations may contain solubilizers, stabilizers, tonicity enhancing agents, buffers and preservatives.

[0732] The pharmaceutical composition (or formulation) for application may be packaged in a variety of ways depending upon the method used for administering the drug. Generally, an article for distribution includes a container having deposited therein the pharmaceutical formulation in an appropriate form. Suitable containers are well-known to those skilled in the art and include materials such as bottles (plastic and glass), sachets, ampoules, plastic bags, metal cylinders, and the like. The container may also include a tamper-proof assemblage to prevent indiscreet access to the contents of the package. In addition, the container has deposited thereon a label that describes the contents of the container. The label may also include appropriate warnings. The invention also provides for a pharmaceutical combinations, e.g. a kit, comprising a) a first agent which is an LSD1 inhibitor as disclosed herein, in free form or in pharmaceutically acceptable salt form, and b) at least one additional agent. The kit can comprise instructions for its administration.

[0733] The term “pharmaceutical combination” as used herein means a product that results from the mixing or combining of more than one active ingredient and includes both fixed and non-fixed combinations of the active ingredients. The term “fixed combination” means that the active ingredients, e.g. an LSD1 inhibitor and other agent, are both administered to a patient simultaneously in the form of a single entity or dosage. The term “non-fixed combination” means that the active ingredients, e.g. an LSD1 inhibitor and other agent, are both administered to a patient as separate entities either simultaneously, concurrently or sequentially with no specific time limits, wherein such administration provides therapeutically effective levels of the 2 compounds in the body of the patient. The latter also applies to cocktail therapy, e.g. the administration of 3 or more active ingredients.

### Chimeric Antigen Receptors

### General Description of Chimeric Antigen Receptor Technology Relevant to the Invention

[0734] Described herein are methods for combining the administration of LSD1 inhibitors with administration of a population of immune effector cells, e.g., T cells or NK cells, engineered to express a CAR molecule, e.g., as described herein (the cell is engineered to express a CAR, and in embodiments, expresses the CAR by the time at which it is administered to the subject. In other embodiments, expression initiates after administration.) In some embodiments, the cell is a T cell engineered to express a CAR molecule, e.g., as described herein, wherein the CART cell (“CART”) exhibits an anticancer property. Also described herein are methods for using LSD1 inhibitors for the manufacture, e.g., the activation and/or expansion, a population of immune effector cells, e.g., T cells or NK cells, engineered to express a CAR molecule, e.g., as described herein, wherein the cells have enhanced activity (e.g., proliferation, cytokine release, and/or tumor targeting efficacy) and/or a more naive phenotype, relative to cells manufactured without the use of LSD1 inhibitors. In general, the molecules, cells, methods or other aspects discussed in this section may be useful in the methods, compositions, cells and other aspects of the invention, e.g., in combination with LSD1 inhibitors.

[0735] In general, the invention pertains to an isolated nucleic acid molecule encoding a chimeric antigen receptor (CAR), wherein the CAR comprises an antigen binding domain (e.g., antibody or antibody fragment, TCR or TCR fragment) that binds to a tumor antigen as described herein, a transmembrane domain (e.g., a transmembrane domain described herein), and an intracellular signaling domain (e.g., an intracellular signaling domain described herein) (e.g., an intracellular signaling domain comprising a costimulatory domain (e.g., a costimulatory domain described herein) and/or a primary signaling domain (e.g., a primary signaling domain described herein). In other aspects, the invention includes: host cells containing the above nucleic acids and isolated proteins encoded by such nucleic acid molecules. CAR nucleic acid constructs, encoded proteins, containing vectors, host cells, pharmaceutical compositions, and methods of administration and treatment related to the present invention are disclosed in detail in International Patent Application Publication No. WO2015/142675, which is incorporated by reference in its entirety.

[0736] In one aspect, the invention pertains to an isolated nucleic acid molecule encoding a chimeric antigen receptor (CAR), wherein the CAR comprises an antigen binding domain (e.g., antibody or antibody fragment, TCR or TCR fragment) that binds to a tumor-supporting antigen (e.g., a tumor-supporting antigen as described herein), a transmembrane domain (e.g., a transmembrane domain described herein), and an intracellular signaling domain (e.g., an intracellular signaling domain described herein) (e.g., an intracellular signaling domain comprising a costimulatory domain (e.g., a costimulatory domain described herein) and/or a primary signaling domain (e.g., a primary signaling domain described herein). In some embodiments, the tumor-supporting antigen is an antigen present on a stromal cell or a myeloid-derived suppressor cell (MDSC). In other aspects, the invention features polypeptides encoded by such nucleic acids and host cells containing such nucleic acids and/or polypeptides. In other aspects, the invention features cells (e.g., a population of cells), e.g., immune effector cells, e.g., T cells or NK cells, engineered to express a CAR molecule, e.g., as described herein.

### Targets

[0737] The present invention provides immune effector cells (e.g., T cells, NK cells) that are engineered to contain one or more CARs that direct the immune effector cells to undesired cells (e.g., cancer cells).

[0738] This is achieved through an antigen binding domain on the CAR that is specific for a cancer associated antigen. There are two classes of cancer associated antigens (tumor antigens) that can be targeted by the CARs of the instant invention: (1) cancer associated antigens that are expressed on the surface of cancer cells; and (2) cancer associated antigens that itself is intracellar, however, a fragment of such antigen (peptide) is presented on the surface of the cancer cells by MHC (major histocompatibility complex).

[0739] In some embodiments, the tumor antigen is chosen from one or more of: CD19; CD123; CD22; CD30; CD171; CS-1 (also referred to as CD2 subset 1, CRACC, SLAMF7, CD319, and 19A24); C-type lectin-like molecule-1 (CLL-1 or CLECL1); CD33; epidermal growth factor receptor variant III (EGFRvIII); ganglioside G2 (GD2); ganglioside GD3 (aNeu5Ac(2-8)aNeu5Ac(2-3)bDGalp(1-4)bDGlcp(1-1)Cer); TNF receptor family member B cell maturation (BCMA); Tn antigen ((Tn Ag) or (GalNAcα-Ser/Thr)); prostate-specific membrane antigen (PSMA); Receptor tyrosine kinase-like orphan receptor 1 (ROR1); Fms-Like Tyrosine Kinase 3 (FLT3); Tumor-associated glycoprotein 72 (TAG72); CD38; CD44v6; Carcinoembryonic antigen (CEA); Epithelial cell adhesion molecule (EPCAM); B7H3 (CD276); KIT (CD117); Interleukin-13 receptor subunit alpha-2 (IL-13Ra2 or CD213A2); Mesothelin; Interleukin 11 receptor alpha (IL-11Ra); prostate stem cell antigen (PSCA); Protease Serine 21 (Testisin or PRSS21); vascular endothelial growth factor receptor 2 (VEGFR2); Lewis(Y) antigen; CD24; Platelet-derived growth factor receptor beta (PDGFR-beta); Stage-specific embryonic antigen-4 (SSEA-4); CD20; Folate receptor alpha; Receptor tyrosine-protein kinase ERBB2 (Her2/neu); Mucin 1, cell surface associated (MUC1); epidermal growth factor receptor (EGFR); neural cell adhesion molecule (NCAM); Prostase; prostatic acid phosphatase (PAP); elongation factor 2 mutated (ELF2M); Ephrin B2; fibroblast activation protein alpha (FAP); insulin-like growth factor 1 receptor (IGF-I receptor), carbonic anhydrase IX (CAIX); Proteasome (Prosome, Macropain) Subunit, Beta Type, 9 (LMP2); glycoprotein 100 (gp100); oncogene fusion protein consisting of breakpoint cluster region (BCR) and Abelson murine leukemia viral oncogene homolog 1 (Abl) (bcr-abl); tyrosinase; ephrin type-A receptor 2 (EphA2); Fucosyl GM1; sialyl Lewis adhesion molecule (sLe); ganglioside GM3 (aNeu5Ac(2-3)bDGalp(1-4)bDGlcp(1-1)Cer); transglutaminase 5 (TGS5); high molecular weight-melanoma-associated antigen (HMWMAA); o-acetyl-GD2 ganglioside (OAcGD2); Folate receptor beta; tumor endothelial marker 1 (TEM1/CD248); tumor endothelial marker 7-related (TEM7R); claudin 6 (CLDN6); thyroid stimulating hormone receptor (TSHR); G protein-coupled receptor class C group 5, member D (GPRC5D); chromosome X open reading frame 61 (CXORF61); CD97; CD179a; anaplastic lymphoma kinase (ALK); Polysialic acid; placenta-specific 1 (PLAC1); hexasaccharide portion of globoH glycoceramide (GloboH); mammary gland differentiation antigen (NY-BR-1); uroplakin 2 (UPK2); Hepatitis A virus cellular receptor 1 (HAVCR1); adrenoceptor beta 3 (ADRB3); pannexin 3 (PANX3); G protein-coupled receptor 20 (GPR20); lymphocyte antigen 6 complex, locus K 9 (LY6K); Olfactory receptor 51E2 (OR51E2); TCR Gamma Alternate Reading Frame Protein (TARP); Wilms tumor protein (WT1); Cancer/testis antigen 1 (NY-ESO-1); Cancer/testis antigen 2 (LAGE-1a); Melanoma-associated antigen 1 (MAGE-A1); ETS translocation-variant gene 6, located on chromosome 12p (ETV6-AML); sperm protein 17 (SPA17); X Antigen Family, Member 1A (XAGE1); angiopoietin-binding cell surface receptor 2 (Tie 2); melanoma cancer testis antigen-1 (MAD-CT-1); melanoma cancer testis antigen-2 (MAD-CT-2); Fos-related antigen 1; tumor protein p53 (p53); p53 mutant; prostein; surviving; telomerase; prostate carcinoma tumor antigen-1 (PCTA-1 or Galectin 8), melanoma antigen recognized by T cells 1 (MelanA or MART1); Rat sarcoma (Ras) mutant; human Telomerase reverse transcriptase (hTERT); sarcoma translocation breakpoints; melanoma inhibitor of apoptosis (ML-IAP); ERG (transmembrane protease, serine 2 (TMPRSS2) ETS fusion gene); N-Acetyl glucosaminyl-transferase V (NA17); paired box protein Pax-3 (PAX3); Androgen receptor; Cyclin B1; v-myc avian myelocytomatosis viral oncogene neuroblastoma derived homolog (MYCN); Ras Homolog Family Member C (RhoC); Tyrosinase-related protein 2 (TRP-2); Cytochrome P450 1B1 (CYP1B1); CCCTC-Binding Factor (Zinc Finger Protein)-Like (BORIS or Brother of the Regulator of Imprinted Sites), Squamous Cell Carcinoma Antigen Recognized By T Cells 3 (SART3); Paired box protein Pax-5 (PAX5); proacrosin binding protein sp32 (OY-TES1); lymphocyte-specific protein tyrosine kinase (LCK); A kinase anchor protein 4 (AKAP-4); synovial sarcoma, X breakpoint 2 (SSX2); Receptor for Advanced Glycation Endproducts (RAGE-1); renal ubiquitous 1 (RU1); renal ubiquitous 2 (RU2); legumain; human papilloma virus E6 (HPV E6); human papilloma virus E7 (HPV E7); intestinal carboxyl esterase; heat shock protein 70-2 mutated (mut hsp70-2); CD79a; CD79b; CD72; Leukocyte-associated immunoglobulin-like receptor 1 (LAIR1); Fc fragment of IgA receptor (FCAR or CD89); Leukocyte immunoglobulin-like receptor subfamily A member 2 (LILRA2); CD300 molecule-like family member f (CD300LF); C-type lectin domain family 12 member A (CLEC12A); bone marrow stromal cell antigen 2 (BST2); EGF-like module-containing mucin-like hormone receptor-like 2 (EMR2); lymphocyte antigen 75 (LY75); Glypican-3 (GPC3); Fc receptor-like 5 (FCRL5); and immunoglobulin lambda-like polypeptide 1 (IGLL1).

[0740] A CAR described herein can comprise an antigen binding domain (e.g., antibody or antibody fragment, TCR or TCR fragment) that binds to a tumor-supporting antigen (e.g., a tumor-supporting antigen as described herein). In some embodiments, the tumor-supporting antigen is an antigen present on a stromal cell or a myeloid-derived suppressor cell (MDSC). Stromal cells can secrete growth factors to promote cell division in the microenvironment. MDSC cells can inhibit T cell proliferation and activation. Without wishing to be bound by theory, in some embodiments, the CAR-expressing cells destroy the tumor-supporting cells, thereby indirectly inhibiting tumor growth or survival.

[0741] In embodiments, the stromal cell antigen is chosen from one or more of: bone marrow stromal cell antigen 2 (BST2), fibroblast activation protein (FAP) and tenascin. In an embodiment, the FAP-specific antibody is, competes for binding with, or has the same CDRs as, sibrotuzumab. In embodiments, the MDSC antigen is chosen from one or more of: CD33, CD11b, C14, CD15, and CD66b. Accordingly, in some embodiments, the tumor-supporting antigen is chosen from one or more of: bone marrow stromal cell antigen 2 (BST2), fibroblast activation protein (FAP) or tenascin, CD33, CD11b, C14, CD15, and CD66b.

### Antigen Binding Domain Structures

[0742] In some embodiments, the antigen binding domain of the encoded CAR molecule comprises an antibody, an antibody fragment, an scFv, a Fv, a Fab, a (Fab′)2, a single domain antibody (SDAB), a VH or VL domain, a camelid VHH domain or a bi-functional (e.g. bi-specific) hybrid antibody (e.g., Lanzavecchia et al., Eur. J. Immunol. 17, 105 (1987)).

[0743] In some instances, scFvs can be prepared according to method known in the art (see, for example, Bird et al., (1988) Science 242:423-426 and Huston et al., (1988) Proc. Natl. Acad. Sci. USA 85:5879-5883). ScFv molecules can be produced by linking VH and VL regions together using flexible polypeptide linkers. The scFv molecules comprise a linker (e.g., a Ser-Gly linker) with an optimized length and/or amino acid composition. The linker length can greatly affect how the variable regions of a scFv fold and interact. In fact, if a short polypeptide linker is employed (e.g., between 5-10 amino acids) intrachain folding is prevented. Interchain folding is also required to bring the two variable regions together to form a functional epitope binding site. For examples of linker orientation and size see, e.g., Hollinger et al. 1993 Proc Natl Acad. Sci. U.S.A. 90:6444-6448, U.S. Patent Application Publication Nos. 2005/0100543, 2005/0175606, 2007/0014794, and PCT publication Nos. WO2006/020258 and WO2007/024715, is incorporated herein by reference.

[0744] An scFv can comprise a linker of at least 1, 2, 3, 4, 5, 6, 7, 8, 9, 10, 11, 12, 13, 14, 15, 16, 17, 18, 19, 20, 25, 30, 35, 40, 45, 50, or more amino acid residues between its VL and VH regions. The linker sequence may comprise any naturally occurring amino acid. In some embodiments, the linker sequence comprises amino acids glycine and serine. In another embodiment, the linker sequence comprises sets of glycine and serine repeats such as (Gly₄Ser)n, where n is a positive integer equal to or greater than 1 (SEQ ID NO:22). In one embodiment, the linker can be (Gly₄Ser)₄ (SEQ ID NO:29) or (Gly₄Ser)₃(SEQ ID NO:30). Variation in the linker length may retain or enhance activity, giving rise to superior efficacy in activity studies.

[0745] In another aspect, the antigen binding domain is a T cell receptor (“TCR”), or a fragment thereof, for example, a single chain TCR (scTCR). Methods to make such TCRs are known in the art. See, e.g., Willemsen R A et al, Gene Therapy 7: 1369-1377 (2000); Zhang T et al, Cancer Gene Ther 11: 487-496 (2004); Aggen et al, Gene Ther. 19(4):365-74 (2012) (references are incorporated herein by its entirety). For example, scTCR can be engineered that contains the Vα and Vβ genes from a T cell clone linked by a linker (e.g., a flexible peptide). This approach is very useful to cancer associated target that itself is intracellar, however, a fragment of such antigen (peptide) is presented on the surface of the cancer cells by MHC.

[0746] In certain embodiments, the encoded antigen binding domain has a binding affinity KD of 10⁻⁴ M to 10⁻⁸ M.

[0747] In one embodiment, the encoded CAR molecule comprises an antigen binding domain that has a binding affinity KD of 10-4 M to 10-8 M, e.g., 10-5 M to 10-7 M, e.g., 10-6 M or 10-7 M, for the target antigen. In one embodiment, the antigen binding domain has a binding affinity that is at least five-fold, 10-fold, 20-fold, 30-fold, 50-fold, 100-fold or 1,000-fold less than a reference antibody, e.g., an antibody described herein. In one embodiment, the encoded antigen binding domain has a binding affinity at least 5-fold less than a reference antibody (e.g., an antibody from which the antigen binding domain is derived). In one aspect such antibody fragments are functional in that they provide a biological response that can include, but is not limited to, activation of an immune response, inhibition of signal-transduction origination from its target antigen, inhibition of kinase activity, and the like, as will be understood by a skilled artisan.

[0748] In one aspect, the antigen binding domain of the CAR is a scFv antibody fragment that is humanized compared to the murine sequence of the scFv from which it is derived.

[0749] In one aspect, the antigen binding domain of a CAR of the invention (e.g., a scFv) is encoded by a nucleic acid molecule whose sequence has been codon optimized for expression in a mammalian cell. In one aspect, entire CAR construct of the invention is encoded by a nucleic acid molecule whose entire sequence has been codon optimized for expression in a mammalian cell. Codon optimization refers to the discovery that the frequency of occurrence of synonymous codons (i.e., codons that code for the same amino acid) in coding DNA is biased in different species. Such codon degeneracy allows an identical polypeptide to be encoded by a variety of nucleotide sequences. A variety of codon optimization methods is known in the art, and include, e.g., methods disclosed in at least U.S. Pat. Nos. 5,786,464 and 6,114,148.

[0750] Specific Antigen Binding Domains

[0751] In some embodiments, the portion of the CAR comprising the antigen binding domain comprises an antigen binding domain that targets a tumor antigen, e.g., a tumor antigen described herein (e.g., in the section entitled “Targets.” In some embodiments, the tumor antigen is a tumor antigen described in International Application WO2015/142675, filed Mar. 13, 2015, which is herein incorporated by reference in its entirety. Exemplary target antigens that can be targeted using the CAR-expressing cells, include, but are not limited to, CD19, CD123, EGFRvIII, CD33, mesothelin, BCMA, and GFR ALPHA-4, among others, as described in, for example, WO2014/153270, WO 2014/130635, WO2016/028896, WO 2014/130657, WO2016/014576, WO 2015/090230, WO2016/014565, WO2016/014535, and WO2016/025880, each of which is herein incorporated by reference in its entirety.

[0752] In embodiments, the antigen binding domain comprises one, two, three (e.g., all three) heavy chain CDRs, HC CDR1, HC CDR2 and HC CDR3, from an antibody described herein or in any of the publications incorporated by reference herein, and/or one, two, three (e.g., all three) light chain CDRs, LC CDR1, LC CDR2 and LC CDR3, from an antibody described herein or in any of the publications incorporated by reference herein. In one embodiment, the antigen binding domain comprises a heavy chain variable region and/or a variable light chain region of an antibody described herein or in any of the publications incorporated by reference herein. In one embodiment, the antigen binding domain of any of the CAR molecules described herein (e.g., any of CD19, CD123, EGFRvIII, CD33, mesothelin, BCMA, and GFR ALPHA-4) comprises one, two, three (e.g., all three) heavy chain CDRs, HC CDR1, HC CDR2 and HC CDR3, from an antibody described herein or in any of the publications incorporated by reference herein, and/or one, two, three (e.g., all three) light chain CDRs, LC CDR1, LC CDR2 and LC CDR3, from an antigen binding domain described herein or in any of the publications incorporated by reference herein. In one embodiment, the antigen binding domain comprises a heavy chain variable region and/or a variable light chain region of an antibody described herein or in any of the publications incorporated by reference herein.

[0753] In one embodiment, the antigen binding domain comprises one, two three (e.g., all three) heavy chain CDRs, HC CDR1, HC CDR2 and HC CDR3, from an antibody described herein (e.g., an antibody described in WO2015/142675, US-2015-0283178-A1, US-2016-0046724-A1, US2014/0322212A1, US2016/0068601A1, US2016/0051651A1, US2016/0096892A1, US2014/0322275A1, or WO2015/090230, incorporated herein by reference), and/or one, two, three (e.g., all three) light chain CDRs, LC CDR1, LC CDR2 and LC CDR3, from an antibody described herein (e.g., an antibody described in WO2015/142675, US-2015-0283178-A1, US-2016-0046724-A1, US2014/0322212A1, US2016/0068601A1, US2016/0051651A1, US2016/0096892A1, US2014/0322275A1, or WO2015/090230, incorporated herein by reference). In one embodiment, the antigen binding domain comprises a heavy chain variable region and/or a variable light chain region of an antibody described herein. In embodiments, the antigen binding domain is an antigen binding domain described in WO2015/142675, US-2015-0283178-A1, US-2016-0046724-A1, US2014/0322212A1, US2016/0068601A1, US2016/0051651A1, US2016/0096892A1, US2014/0322275A1, or WO2015/090230, incorporated herein by reference.

[0754] In one embodiment, an antigen binding domain against CD19 is an antigen binding portion, e.g., CDRs, of a CAR (e.g., CD19 CAR), antibody or antigen-binding fragment thereof described in, e.g., PCT publication WO2012/079000; PCT publication WO2014/153270; Kochenderfer, J. N. et al., J. Immunother. 32 (7), 689-702 (2009); Kochenderfer, J. N., et al., Blood, 116 (20), 4099-4102 (2010); PCT publication WO2014/031687; Bejcek, Cancer Research, 55, 2346-2351, 1995; or U.S. Pat. No. 7,446,190.

[0755] In one embodiment, the CD19 CAR includes a CAR molecule, or an antigen binding domain (e.g., a humanized antigen binding domain) according to Table 3 of WO2014/153270, incorporated herein by reference. The amino acid and nucleotide sequences encoding the CD19 CAR molecules and antigen binding domains (e.g., including one, two, three VH CDRs; and one, two, three VL CDRs according to Kabat or Chothia), are specified in WO2014/153270. In embodiments, the CD19 CAR, or antigen binding domain, comprises an amino acid, or has a nucleotide sequence shown in WO2014/153270 incorporated herein by reference, or a sequence substantially identical to any of the aforesaid sequences (e.g., at least 85%, 90%, 95% or more identical to any of the aforesaid sequences).

[0756] In another embodiment, the antigen binding domain comprises an anti-CD19 antibody, or fragment thereof, e.g., an scFv. For example, the antigen binding domain comprises a variable heavy chain and a variable light chain listed in Tables 6-9, or a sequence substantially identical to any of the aforesaid sequences (e.g., at least 85%, 90%, 95% or more identical to any of the aforesaid sequences). The linker sequence joining the variable heavy and variable light chains can be, e.g., any of the linker sequences described herein, or alternatively, can be GSTSGSGKPGSGEGSTKG (SEQ ID NO: 871).

TABLE 6
Anti-CD19 antibody binding domains

| | | |
|---|---|---|
| CD19 | huscFv1 | EIVMTQSPATLSLSPGERATLSCRASQDISKYLNWYQQKPGQAPRLLIYHTSRL |
| | (SEQ ID | HSGIPARFSGSGSGTDYTLTISSLQPEDFAVYFCQQGNTLPYTFGQGTKLEIKG |
| | NO: | GGGSGGGGSGGGGSQVQLQESGPGLVKPSETLSLTCTVSGVSLPDYGVSWIRQP |
| | 872) | PGKGLEWIGVIWGSETTYYSSSLKSRVTISKDNSKNQVSLKLSSVTAADTAVYY |
| | | CAKHYYYGGSYAMDYWGQGTLVTVSS |
| CD19 | huscFv2 | Eivmtqspatlslspgeratlscrasqdiskylnwyqqkpgqaprlliyhtsrlhsgip |
| | (SEQ ID | arfsgsgsgtdytltisslqpedfavyfcqqgntlpytfgqgtkleikggggsggggsg |
| | NO: 873) | gggsqvqlqesgpglvkpsetlsltctvsgvslpdygvswirqppgkglewigviwgse |
| | | ttyyqsslksrvtiskdnsknqvslklssvtaadtavyycakhyyyggsyamdywgqgt |
| | | lvtvss |
| CD19 | huscFv3 | Qvqlqesgpglvkpsetlsltctvsgvslpdygvswirqppgkglewigviwgsettyy |
| | (SEQ ID | ssslksrvtiskdnsknqvslklssvtaadtavyycakhyyyggsyamdywgqgtlvtv |
| | NO: 874) | ssggggsggggsggggseivmtqspatlslspgeratlscrasqdiskylnwyqqkpgq |
| | | aprlliyhtsrlhsgiparfsgsgsgtdytltisslqpedfavyfcqqgntlpytfgqg |
| | | tkleik |
| CD19 | huscFv4 | Qvqlqesgpglvkpsetlsltctvsgvslpdygvswirqppgkglewigviwgsettyy |
| | (SEQ ID | qsslksrvtiskdnsknqvslklssvtaadtavyycakhyyyggsyamdywgqgtlvtv |
| | NO: 875) | ssggggsggggsggggseivmtqspatlslspgeratlscrasqdiskylnwyqqkpgq |
| | | aprlliyhtsrlhsgiparfsgsgsgtdytltisslqpedfavyfcqqgntlpytfgqg |
| | | tkleik |
| CD19 | huscFv5 | Eivmtqspatlslspgeratlscrasqdiskylnwyqqkpgqaprlliyhtsrlhsgip |
| | (SEQ ID | arfsgsgsgtdytltisslqpedfavyfcqqgntlpytfgqgtkleikggggsggggsg |
| | NO: 876) | gggsggggsqvqlqesgpglvkpsetlsltctvsgvslpdygvswirqppgkglewigv |
| | | iwgsettyyssslksrvtiskdnsknqvslklssvtaadtavyycakhyyyggsyamdy |
| | | wgqgtlvtvss |
| CD19 | huscFv6 | Eivmtqspatlslspgeratlscrasqdiskylnwyqqkpgqaprlliyhtsrlhsgip |
| | (SEQ ID | arfsgsgsgtdytltisslqpedfavyfcqqgntlpytfgqgtkleikggggsggggsg |
| | NO: 877) | gggsggggsqvqlqesgpglvkpsetlsltctvsgvslpdygvswirqppgkglewigv |
| | | iwgsettyyqsslksrvtiskdnsknqvslklssvtaadtavyycakhyyyggsyamdy |
| | | wgqgtlvtvss |
| CD19 | huscFv7 | Qvqlqesgpglvkpsetlsltctvsgvslpdygvswirqppgkglewigviwgsettyy |
| | (SEQ ID | ssslksrvtiskdnsknqvslklssvtaadtavyycakhyyyggsyamdywgqgtlvtv |
| | NO: 878) | ssggggsggggsggggsggggseivmtqspatlslspgeratlscrasqdiskylnwyq |
| | | qkpgqaprlliyhtsrlhsgiparfsgsgsgtdytltisslqpedfavyfcqqgntlpy |
| | | tfgqgtkleik |
| CD19 | huscFv8 | Qvqlqesgpglvkpsetlsltctvsgvslpdygvswirqppgkglewigviwgsettyy |
| | (SEQ ID | qsslksrvtiskdnsknqvslklssvtaadtavyycakhyyyggsyamdywgqgtlvtv |
| | NO: 879) | ssggggsggggsggggsggggseivmtqspatlslspgeratlscrasqdiskylnwyq |
| | | qkpgqaprlliyhtsrlhsgiparfsgsgsgtdytltisslqpedfavyfcqqgntlpy |
| | | tfgqgtkleik |
| CD19 | huscFv9 | Eivmtqspatlslspgeratlscrasqdiskylnwyqqkpgqaprlliyhtsrlhsgip |
| | (SEQ ID | arfsgsgsgtdytltisslqpedfavyfcqqgntlpytfgqgtkleikggggsggggsg |
| | NO: 880) | gggsggggsqvqlqesgpglvkpsetlsltctvsgvslpdygvswirqppgkglewigv |
| | | iwgsettyynsslksrvtiskdnsknqvslklssvtaadtavyycakhyyyggsyamdy |
| | | wgqgtlvtvss |
| CD19 | HuscFv10 | Qvqlqesgpglvkpsetlsltctvsgvslpdygvswirqppgkglewigviwgsettyy |
| | (SEQ ID | nsslksrvtiskdnsknqvslklssvtaadtavyycakhyyyggsyamdywgqgtlvtv |
| | NO: | ssggggsggggsggggsggggseivmtqspatlslspgeratlscrasqdiskylnwyq |
| | 881) | qkpgqaprlliyhtsrlhsgiparfsgsgsgtdytltisslqpedfavyfcqqgntlpy |
| | | tfgqgtkleik |
| CD19 | HuscFv11 | Eivmtqspatlslspgeratlscrasqdiskylnwyqqkpgqaprlliyhtsrlhsgip |
| | (SEQ ID | arfsgsgsgtdytltisslqpedfavyfcqqgntlpytfgqgtkleikggggsggggsg |
| | NO: 882) | gggsqvqlqesgpglvkpsetlsltctvsgvslpdygvswirqppgkglewigviwgse |
| | | ttyynsslksrvtiskdnsknqvslklssvtaadtavyycakhyyyggsyamdywgqgt |
| | | lvtvss |
| CD19 | HuscFv12 | Qvqlqesgpglvkpsetlsltctvsgvslpdygvswirqppgkglewigviwgsettyy |
| | (SEQ ID | nsslksrvtiskdnsknqvslklssvtaadtavyycakhyyyggsyamdywgqgtlvtv |
| | NO: 883) | ssggggsggggsggggseivmtqspatlslspgeratlscrasqdiskylnwyqqkpgq |
| | | aprlliyhtsrlhsgiparfsgsgsgtdytltisslqpedfavyfcqqgntlpytfgqg |
| | | tkleik |
| CD19 | muCTL019 | Diqmtqttsslsaslgdrvtiscrasqdiskylnwyqqkpdgtvklliyhtsrlhsgvp |
| | (SEQ | srfsgsgsgtdysltisnleqediatyfcqqgntlpytfgggtkleitggggsggggsg |
| | ID NO: | gggsevklqesgpglvapsqslsvtctvsgvslpdygvswirqpprkglewlgviwgse |
| | 884) | ttyynsalksrltiikdnsksqvflkmnslqtddtaiyycakhyyyggsyamdywgqgt |
| | | svtvss |

TABLE 7
Additional anti-CD19 antibody binding domains

| Antibody | VH Sequence | VL Sequence |
|---|---|---|
| SSJ25-C1 | QVQLLESGAELVRPGSSVKISCKASGYAFSS | ELVLTQSPKFMSTSVGDRVSVTCKASQNVGTNVA |
| | YWMNWVKQRPGQGLEWIGQIYPGDGDTNYNG | WYQQKPGQSPKPLIYSATYRNSGVPDRFTGSGSG |
| | KFKGQATLTADKSSSTAYMQLSGLTSEDSAV | TDFTLTITNVQSKDLADYFYFCQYNRYPYTSGGG |
| | YSCARKTISSVVDFYFDYWGQGTTVT (SEQ | TKLEIKRRS (SEQ ID NO: 886) |
| | ID NO: 885) | |

TABLE 8
Additional murine anti-CD19 antibody binding domains

| | | |
|---|---|---|
| mCAR1 scFv | SEQ ID | QVQLLESGAELVRPGSSVKISCKASGYAFSSYWMNWVKQRPGQGLEWIGQIYPGDG |
| | NO: 887 | DTNYNGKFKGQATLTADKSSSTAYMQLSGLTSEDSAVYSCARKTISSVVDFYFDYW |
| | | GQGTTVTGGGSGGGSGGGSGGGSELVLTQSPKFMSTSVGDRVSVTCKASQNVGTNV |
| | | AWYQQKPGQSPKPLIYSATYRNSGVPDRFTGSGSGTDFTLTITNVQSKDLADYFCQ |
| | | YNRYPYTSFFFTKLEIKRRS |
| mCAR2 scFv | SEQ ID | DIQMTQTTSSLSASLGDRVTISCRASQDISKYLNWYQQKPDGTVKLLIYHTSRLHS |
| | NO: 888 | GVPSRFSGSGSGTDYSLTISNLEQEDIATYFCQQGNTLPYTFGGGTKLEITGSTSG |
| | | SGKPGSGEGSTKGEVKLQESGPGLVAPSQSLSVTCTVSGVSLPDYGVSWIRQPPRK |
| | | GLEWLGVIWGSETTYYNSALKSRLTIIKDNSKSQVFLKMNSLQTDDTAIYYCAKHY |
| | | YYGGSYAMDYWGQGTSVTVSSE |
| mCAR3 scFv | SEQ ID | DIQMTQTTSSLSASLGDRVTISCRASQDISKYLNWYQQKPDGTVKLLIYHTSRLHS |
| | NO: 889 | GVPSRFSGSGSGTDYSLTISNLEQEDIATYFCQQGNTLPYTFGGGTKLEITGSTSG |
| | | SGKPGSGEGSTKGEVKLQESGPGLVAPSQSLSVTCTVSGVSLPDYGVSWIRQPPRK |
| | | GLEWLGVIWGSETTYYNSALKSRLTIIKDNSKSQVFLKMNSLQTDDTAIYYCAKHY |
| | | YYGGSYAMDYWGQGTSVTVSS |

[0757] Any CD19 CAR, e.g., the CD19 antigen binding domain of any known CD19 CAR, can be used in accordance with the present disclosure. For example, LG-740; CD19 CAR described in the U.S. Pat. No. 8,399,645; U.S. Pat. No. 7,446,190; Xu et al., Leuk Lymphoma. 2013 54(2):255-260(2012); Cruz et al., Blood 122(17):2965-2973 (2013); Brentjens et al., Blood, 118(18):4817-4828 (2011); Kochenderfer et al., Blood 116(20):4099-102 (2010); Kochenderfer et al., Blood 122 (25):4129-39(2013); and 16th Annu Meet Am Soc Gen Cell Ther (ASGCT) (May 15-18, Salt Lake City) 2013, Abst 10.

[0758] In one embodiment, an antigen binding domain against EGFRvIII is an antigen binding portion, e.g., CDRs, of a CAR, antibody or antigen-binding fragment thereof described in, e.g., PCT publication WO2014/130657 or US2014/0322275A1. In one embodiment, the CAR molecule comprises an EGFRvIII CAR, or an antigen binding domain according to Table 2 or SEQ ID NO:11 of WO 2014/130657, incorporated herein by reference, or a sequence substantially identical thereto (e.g., at least 85%, 90%, 95% or more identical thereto). The amino acid and nucleotide sequences encoding the EGFRvIII CAR molecules and antigen binding domains (e.g., including one, two, three VH CDRs; and one, two, three VL CDRs according to Kabat or Chothia), are specified in WO 2014/130657.

[0759] In one embodiment, an antigen binding domain against mesothelin is an antigen binding portion, e.g., CDRs, of an antibody, antigen-binding fragment or CAR described in, e.g., PCT publication WO2015/090230. In one embodiment, an antigen binding domain against mesothelin is an antigen binding portion, e.g., CDRs, of an antibody, antigen-binding fragment, or CAR described in, e.g., PCT publication WO1997/025068, WO1999/028471, WO2005/014652, WO2006/099141, WO2009/045957, WO2009/068204, WO2013/142034, WO2013/040557, or WO2013/063419.

[0760] In an embodiment, the CAR molecule comprises a mesothelin CAR described herein, e.g., a mesothelin CAR described in WO 2015/090230, incorporated herein by reference. In embodiments, the mesothelin CAR comprises an amino acid, or has a nucleotide sequence shown in WO 2015/090230 incorporated herein by reference, or a sequence substantially identical to any of the aforesaid sequences (e.g., at least 85%, 90%, 95% or more identical to any of the aforesaid mesothelin CAR sequences). In one embodiment, the CAR molecule comprises a mesothelin CAR, or an antigen binding domain according to Tables 2-3 of WO 2015/090230, incorporated herein by reference, or a sequence substantially identical thereto (e.g., at least 85%, 90%, 95% or more identical thereto). The amino acid and nucleotide sequences encoding the mesothelin CAR molecules and antigen binding domains (e.g., including one, two, three VH CDRs; and one, two, three VL CDRs according to Kabat or Chothia), are specified in WO 2015/090230.

[0761] In one embodiment, an antigen binding domain against CD123 is an antigen binding portion, e.g., CDRs, of an antibody, antigen-binding fragment or CAR described in, e.g., PCT publication WO2016/028896. In one embodiment, an antigen binding domain against CD123 is an antigen binding portion, e.g., CDRs, of an antibody, antigen-binding fragment or CAR described in, e.g., PCT publication WO2014/130635. In one embodiment, an antigen binding domain against CD123 is an antigen binding portion, e.g., CDRs, of an antibody, antigen-binding fragment, or CAR described in, e.g., PCT publication WO2014/138805, WO2014/138819, WO2013/173820, WO2014/144622, WO2001/66139, WO2010/126066, WO2014/144622, or US2009/0252742.

[0762] In one embodiment, an antigen binding domain against CD123 is an antigen binding portion, e.g., CDRs, of an antibody, antigen-binding fragment or CAR described in, e.g., US2014/0322212A1 or US2016/0068601A1, both incorporated herein by reference. In embodiments, the CD123 CAR comprises an amino acid, or has a nucleotide sequence shown in US2014/0322212A1 or US2016/0068601A1, both incorporated herein by reference, or a sequence substantially identical to any of the aforesaid sequences (e.g., at least 85%, 90%, 95% or more identical to any of the aforesaid CD123 CAR sequences). In one embodiment, the CAR molecule comprises a CD123 CAR (e.g., any of the CAR1-CAR8), or an antigen binding domain according to Tables 1-2 of WO 2014/130635, incorporated herein by reference, or a sequence substantially identical thereto (e.g., at least 85%, 90%, 95% or more identical to any of the aforesaid CD123 CAR sequences). The amino acid and nucleotide sequences encoding the CD123 CAR molecules and antigen binding domains (e.g., including one, two, three VH CDRs; and one, two, three VL CDRs according to Kabat or Chothia), are specified in WO 2014/130635.

[0763] In other embodiments, the CAR molecule comprises a CD123 CAR comprises a CAR molecule (e.g., any of the CAR123-1 to CAR123-4 and hzCAR123-1 to hzCAR123-32), or an antigen binding domain according to Tables 2, 6, and 9 of WO2016/028896, incorporated herein by reference, or a sequence substantially identical thereto (e.g., at least 85%, 90%, 95% or more identical to any of the aforesaid CD123 CAR sequences). The amino acid and nucleotide sequences encoding the CD123 CAR molecules and antigen binding domains (e.g., including one, two, three VH CDRs; and one, two, three VL CDRs according to Kabat or Chothia), are specified in WO2016/028896.

[0764] In one embodiment, an antigen binding domain against CD22 is an antigen binding portion, e.g., CDRs, of an antibody described in, e.g., Haso et al., Blood, 121(7): 1165-1174 (2013); Wayne et al., Clin Cancer Res 16(6): 1894-1903 (2010); Kato et al., Leuk Res 37(1):83-88 (2013); Creative BioMart (creativebiomart.net): MOM-18047-S(P).

[0765] In one embodiment, an antigen binding domain against CS-1 is an antigen binding portion, e.g., CDRs, of Elotuzumab (BMS), see e.g., Tai et al., 2008, Blood 112(4):1329-37; Tai et al., 2007, Blood. 110(5):1656-63.

[0766] In one embodiment, an antigen binding domain against CLL-1 is an antigen binding portion, e.g., CDRs, of an antibody available from R&D, ebiosciences, Abcam, for example, PE-CLL1-hu Cat#353604 (Bio Legend); and PE-CLL1 (CLEC12A) Cat#562566 (BD).

[0767] In other embodiments, the CLL1 CAR includes a CAR molecule, or an antigen binding domain according to Table 2 of WO2016/014535, incorporated herein by reference. The amino acid and nucleotide sequences encoding the CLL-1 CAR molecules and antigen binding domains (e.g., including one, two, three VH CDRs; and one, two, three VL CDRs according to Kabat or Chothia), are specified in WO2016/014535.

[0768] In one embodiment, an antigen binding domain against CD33 is an antigen binding portion, e.g., CDRs, of an antibody described in, e.g., Bross et al., Clin Cancer Res 7(6):1490-1496 (2001) (Gemtuzumab Ozogamicin, hP67.6), Caron et al., Cancer Res 52(24):6761-6767 (1992) (Lintuzumab, HuM195), Lapusan et al., Invest New Drugs 30(3):1121-1131 (2012) (AVE9633), Aigner et al., Leukemia 27(5): 1107-1115 (2013) (AMG330, CD33 BiTE), Dutour et al., Adv hematol 2012:683065 (2012), and Pizzitola et al., Leukemia doi:10.1038/Lue.2014.62 (2014).

[0769] In one embodiment, an antigen binding domain against CD33 is an antigen binding portion, e.g., CDRs, of an antibody described in, US2016/0096892A1, incorporated herein by reference. In embodiments, the CD33 CAR comprises an amino acid, or has a nucleotide sequence shown in US2016/0096892A1, incorporated herein by reference, or a sequence substantially identical to any of the aforesaid sequences (e.g., at least 85%, 90%, 95% or more identical to any of the aforesaid CD33 CAR sequences). In other embodiments, the CD33 CAR CAR or antigen binding domain thereof can include a CAR molecule (e.g., any of CAR33-1 to CAR-33-9), or an antigen binding domain according to Table 2 or 9 of WO2016/014576, incorporated herein by reference, or a sequence substantially identical to any of the aforesaid sequences (e.g., at least 85%, 90%, 95% or more identical to any of the aforesaid CD33 CAR sequences). The amino acid and nucleotide sequences encoding the CD33 CAR molecules and antigen binding domains (e.g., including one, two, three VH CDRs; and one, two, three VL CDRs according to Kabat or Chothia), are specified in WO2016/014576.

[0770] In one embodiment, an antigen binding domain against GD2 is an antigen binding portion, e.g., CDRs, of an antibody described in, e.g., Mujoo et al., Cancer Res. 47(4):1098-1104 (1987); Cheung et al., Cancer Res 45(6):2642-2649 (1985), Cheung et al., J Clin Oncol 5(9):1430-1440 (1987), Cheung et al., J Clin Oncol 16(9):3053-3060 (1998), Handgretinger et al., Cancer Immunol Immunother 35(3):199-204 (1992). In some embodiments, an antigen binding domain against GD2 is an antigen binding portion of an antibody selected from mAb 14.18, 14G2a, ch14.18, hu14.18, 3F8, hu3F8, 3G6, 8B6, 60C3, 1068, ME36.1, and 8H9, see e.g., WO2012033885, WO2013040371, WO2013192294, WO2013061273, WO2013123061, WO2013074916, and WO201385552. In some embodiments, an antigen binding domain against GD2 is an antigen binding portion of an antibody described in US Publication No.: 20100150910 or PCT Publication No.: WO 2011160119.

[0771] In one embodiment, an antigen binding domain against BCMA is an antigen binding portion, e.g., CDRs, of an antibody, antigen-binding fragment or CAR described in, e.g., PCT publication WO2016/014565, e.g., the antigen binding portion of CAR BCMA-10 as described in WO2016/014565. In one embodiment, an antigen binding domain against BCMA is an antigen binding portion, e.g., CDRs, of an antibody, antigen-binding fragment or CAR described in, e.g., PCT publication WO2016/014789. In one embodiment, an antigen binding domain against BCMA is an antigen binding portion, e.g., CDRs, of an antibody described in, e.g., WO2012/163805, WO2001/12812, and WO2003/062401.

[0772] In other embodiment, the CAR molecule comprises a BCMA CAR molecule, or an antigen binding domain against BCMA described herein, e.g., a BCMA CAR described in US-2016-0046724-A1 or WO2016/014565. In embodiments, the BCMA CAR comprises an amino acid, or has a nucleotide sequence of a CAR molecule, or an antigen binding domain according to US-2016-0046724-A1, or Table 1 or 16, SEQ ID NO: 271 or SEQ ID NO: 273 of WO2016/014565, incorporated herein by reference, or a sequence substantially identical to any of the aforesaid sequences (e.g., at least 85%, 90%, 95% or more identical to any of the aforesaid BCMA CAR sequences). The amino acid and nucleotide sequences encoding the BCMA CAR molecules and antigen binding domains (e.g., including one, two, three VH CDRs; and one, two, three VL CDRs according to Kabat or Chothia), are specified in WO2016/014565.

[0773] In one embodiment, an antigen binding domain against GFR ALPHA-4 CAR antigen is an antigen binding portion, e.g., CDRs, of an antibody described in, e.g., WO2016/025880, incorporated herein by reference. In one embodiment, the CAR molecule comprises an a GFR ALPHA-4 CAR, e.g., a CAR molecule, or an antigen binding domain according to Table 2 of WO2016/025880, incorporated herein by reference, or a sequence substantially identical to any of the aforesaid sequences (e.g., at least 85%, 90%, 95% or more identical to any of the aforesaid GFR ALPHA-4 sequences). The amino acid and nucleotide sequences encoding the GFR ALPHA-4 CAR molecules and antigen binding domains (e.g., including one, two, three VH CDRs; and one, two, three VL CDRs according to Kabat or Chothia), are specified in WO2016/025880.

[0774] In one embodiment, an antigen binding domain against Tn antigen is an antigen binding portion, e.g., CDRs, of an antibody described in, e.g., U.S. Pat. No. 8,440,798; Brooks et al., PNAS 107(22):10056-10061 (2010), and Stone et al., Oncolmmunology 1(6):863-873(2012).

[0775] In one embodiment, an antigen binding domain against PSMA is an antigen binding portion, e.g., CDRs, of an antibody described in, e.g., Parker et al., Protein Expr Purif 89(2):136-145 (2013), US 20110268656 (J591 ScFv); Frigerio et al, European J Cancer 49(9):2223-2232 (2013) (scFvD2B); WO 2006125481 (mAbs 3/A12, 3/E7 and 3/F11) and single chain antibody fragments (scFv A5 and D7).

[0776] In one embodiment, an antigen binding domain against ROR1 is an antigen binding portion, e.g., CDRs, of an antibody described in, e.g., Hudecek et al., Clin Cancer Res 19(12):3153-3164 (2013); WO 2011159847; and US20130101607.

[0777] In one embodiment, an antigen binding domain against FLT3 is an antigen binding portion, e.g., CDRs, of an antibody described in, e.g., WO2011076922, U.S. Pat. No. 5,777,084, EP0754230, US20090297529, and several commercial catalog antibodies (R&D, ebiosciences, Abcam).

[0778] In one embodiment, an antigen binding domain against TAG72 is an antigen binding portion, e.g., CDRs, of an antibody described in, e.g., Hombach et al., Gastroenterology 113(4):1163-1170 (1997); and Abcam ab691.

[0779] In one embodiment, an antigen binding domain against FAP is an antigen binding portion, e.g., CDRs, of an antibody described in, e.g., Ostermann et al., Clinical Cancer Research 14:4584-4592 (2008) (FAP5), US Pat. Publication No. 2009/0304718; sibrotuzumab (see e.g., Hofheinz et al., Oncology Research and Treatment 26(1), 2003); and Tran et al., J Exp Med 210(6):1125-1135 (2013).

[0780] In one embodiment, an antigen binding domain against CD38 is an antigen binding portion, e.g., CDRs, of daratumumab (see, e.g., Groen et al., Blood 116(21):1261-1262 (2010); MOR202 (see, e.g., U.S. Pat. No. 8,263,746); or antibodies described in U.S. Pat. No. 8,362,211.

[0781] In one embodiment, an antigen binding domain against CD44v6 is an antigen binding portion, e.g., CDRs, of an antibody described in, e.g., Casucci et al., Blood 122(20):3461-3472 (2013).

[0782] In one embodiment, an antigen binding domain against CEA is an antigen binding portion, e.g., CDRs, of an antibody described in, e.g., Chmielewski et al., Gastoenterology 143(4):1095-1107 (2012).

[0783] In one embodiment, an antigen binding domain against EPCAM is an antigen binding portion, e.g., CDRS, of an antibody selected from MT110, EpCAM-CD3 bispecific Ab (see, e.g., clinicaltrials.gov/ct2/show/NCT00635596); Edrecolomab; 3622W94; ING-1; and adecatumumab (MT201).

[0784] In one embodiment, an antigen binding domain against PRSS21 is an antigen binding portion, e.g., CDRs, of an antibody described in U.S. Pat. No. 8,080,650.

[0785] In one embodiment, an antigen binding domain against B7H3 is an antigen binding portion, e.g., CDRs, of an antibody MGA271 (Macrogenics).

[0786] In one embodiment, an antigen binding domain against KIT is an antigen binding portion, e.g., CDRs, of an antibody described in, e.g., U.S. Pat. No. 7,915,391, US20120288506, and several commercial catalog antibodies.

[0787] In one embodiment, an antigen binding domain against IL-13Ra2 is an antigen binding portion, e.g., CDRs, of an antibody described in, e.g., WO2008/146911, WO2004087758, several commercial catalog antibodies, and WO2004087758.

[0788] In one embodiment, an antigen binding domain against CD30 is an antigen binding portion, e.g., CDRs, of an antibody described in, e.g., U.S. Pat. No. 7,090,843 B1, and EP0805871.

[0789] In one embodiment, an antigen binding domain against GD3 is an antigen binding portion, e.g., CDRs, of an antibody described in, e.g., U.S. Pat. No. 7,253,263; U.S. Pat. No. 8,207,308; US 20120276046; EP1013761; WO2005035577; and U.S. Pat. No. 6,437,098.

[0790] In one embodiment, an antigen binding domain against CD171 is an antigen binding portion, e.g., CDRs, of an antibody described in, e.g., Hong et al., J Immunother 37(2):93-104 (2014).

[0791] In one embodiment, an antigen binding domain against IL-11Ra is an antigen binding portion, e.g., CDRs, of an antibody available from Abcam (cat# ab55262) or Novus Biologicals (cat# EPR5446). In another embodiment, an antigen binding domain again IL-11Ra is a peptide, see, e.g., Huang et al., Cancer Res 72(1):271-281 (2012).

[0792] In one embodiment, an antigen binding domain against PSCA is an antigen binding portion, e.g., CDRs, of an antibody described in, e.g., Morgenroth et al., Prostate 67(10):1121-1131 (2007) (scFv 7F5); Nejatollahi et al., J of Oncology 2013(2013), article ID 839831 (scFv C5-II); and US Pat Publication No. 20090311181.

[0793] In one embodiment, an antigen binding domain against VEGFR2 is an antigen binding portion, e.g., CDRs, of an antibody described in, e.g., Chinnasamy et al., J Clin Invest 120(11):3953-3968 (2010).

[0794] In one embodiment, an antigen binding domain against LewisY is an antigen binding portion, e.g., CDRs, of an antibody described in, e.g., Kelly et al., Cancer Biother Radiopharm 23(4):411-423 (2008) (hu3S193 Ab (scFvs)); Dolezal et al., Protein Engineering 16(1):47-56 (2003) (NC10 scFv).

[0795] In one embodiment, an antigen binding domain against CD24 is an antigen binding portion, e.g., CDRs, of an antibody described in, e.g., Maliar et al., Gastroenterology 143(5):1375-1384 (2012).

[0796] In one embodiment, an antigen binding domain against PDGFR-beta is an antigen binding portion, e.g., CDRs, of an antibody Abcam ab32570.

[0797] In one embodiment, an antigen binding domain against SSEA-4 is an antigen binding portion, e.g., CDRs, of antibody MC813 (Cell Signaling), or other commercially available antibodies.

[0798] In one embodiment, an antigen binding domain against CD20 is an antigen binding portion, e.g., CDRs, of the antibody Rituximab, Ofatumumab, Ocrelizumab, Veltuzumab, or GA101.

[0799] In one embodiment, an antigen binding domain against Folate receptor alpha is an antigen binding portion, e.g., CDRs, of the antibody IMGN853, or an antibody described in US20120009181; U.S. Pat. No. 4,851,332, LK26: U.S. Pat. No. 5,952,484.

[0800] In one embodiment, an antigen binding domain against ERBB2 (Her2/neu) is an antigen binding portion, e.g., CDRs, of the antibody trastuzumab, or pertuzumab.

[0801] In one embodiment, an antigen binding domain against MUC1 is an antigen binding portion, e.g., CDRs, of the antibody SAR566658.

[0802] In one embodiment, the antigen binding domain against EGFR is antigen binding portion, e.g., CDRs, of the antibody cetuximab, panitumumab, zalutumumab, nimotuzumab, or matuzumab.

[0803] In one embodiment, an antigen binding domain against NCAM is an antigen binding portion, e.g., CDRs, of the antibody clone 2-2B: MAB5324 (EMD Millipore).

[0804] In one embodiment, an antigen binding domain against Ephrin B2 is an antigen binding portion, e.g., CDRs, of an antibody described in, e.g., Abengozar et al., Blood 119(19):4565-4576 (2012).

[0805] In one embodiment, an antigen binding domain against IGF-I receptor is an antigen binding portion, e.g., CDRs, of an antibody described in, e.g., U.S. Pat. No. 8,344,112 B2; EP2322550 A1; WO 2006/138315, or PCT/US2006/022995.

[0806] In one embodiment, an antigen binding domain against CAIX is an antigen binding portion, e.g., CDRs, of the antibody clone 303123 (R&D Systems).

[0807] In one embodiment, an antigen binding domain against LMP2 is an antigen binding portion, e.g., CDRs, of an antibody described in, e.g., U.S. Pat. No. 7,410,640, or US20050129701.

[0808] In one embodiment, an antigen binding domain against gp100 is an antigen binding portion, e.g., CDRs, of the antibody HMB45, NKIbetaB, or an antibody described in WO2013165940, or US20130295007

[0809] In one embodiment, an antigen binding domain against tyrosinase is an antigen binding portion, e.g., CDRs, of an antibody described in, e.g., U.S. Pat. No. 5,843,674; or US19950504048.

[0810] In one embodiment, an antigen binding domain against EphA2 is an antigen binding portion, e.g., CDRs, of an antibody described in, e.g., Yu et al., Mol Ther 22(1):102-111 (2014).

[0811] In one embodiment, an antigen binding domain against GD3 is an antigen binding portion, e.g., CDRs, of an antibody described in, e.g., U.S. Pat. No. 7,253,263; U.S. Pat. No. 8,207,308; US 20120276046; EP1013761 A3; 20120276046; WO2005035577; or U.S. Pat. No. 6,437,098.

[0812] In one embodiment, an antigen binding domain against fucosyl GM1 is an antigen binding portion, e.g., CDRs, of an antibody described in, e.g., US20100297138; or WO2007/067992.

[0813] In one embodiment, an antigen binding domain against sLe is an antigen binding portion, e.g., CDRs, of the antibody G193 (for lewis Y), see Scott A M et al, Cancer Res 60: 3254-61 (2000), also as described in Neeson et al, J Immunol May 2013 190 (Meeting Abstract Supplement) 177.10.

[0814] In one embodiment, an antigen binding domain against GM3 is an antigen binding portion, e.g., CDRs, of the antibody CA 2523449 (mAb 14F7).

[0815] In one embodiment, an antigen binding domain against HMWMAA is an antigen binding portion, e.g., CDRs, of an antibody described in, e.g., Kmiecik et al., Oncoimmunology 3(1):e27185 (2014) (PMID: 24575382) (mAb9.2.27); U.S. Pat. No. 6,528,481; WO2010033866; or US 20140004124.

[0816] In one embodiment, an antigen binding domain against o-acetyl-GD2 is an antigen binding portion, e.g., CDRs, of the antibody 8B6.

[0817] In one embodiment, an antigen binding domain against TEM1/CD248 is an antigen binding portion, e.g., CDRs, of an antibody described in, e.g., Marty et al., Cancer Lett 235(2):298-308 (2006); Zhao et al., J Immunol Methods 363(2):221-232 (2011).

[0818] In one embodiment, an antigen binding domain against CLDN6 is an antigen binding portion, e.g., CDRs, of the antibody IMAB027 (Ganymed Pharmaceuticals), see e.g., clinicaltrial.gov/show/NCT02054351.

[0819] In one embodiment, an antigen binding domain against TSHR is an antigen binding portion, e.g., CDRs, of an antibody described in, e.g., U.S. Pat. No. 8,603,466; U.S. Pat. No. 8,501,415; or U.S. Pat. No. 8,309,693.

[0820] In one embodiment, an antigen binding domain against GPRC5D is an antigen binding portion, e.g., CDRs, of the antibody FAB6300A (R&D Systems); or LS-A4180 (Lifespan Biosciences).

[0821] In one embodiment, an antigen binding domain against CD97 is an antigen binding portion, e.g., CDRs, of an antibody described in, e.g., U.S. Pat. No. 6,846,911; de Groot et al., J Immunol 183(6):4127-4134 (2009); or an antibody from R&D:MAB3734.

[0822] In one embodiment, an antigen binding domain against ALK is an antigen binding portion, e.g., CDRs, of an antibody described in, e.g., Mino-Kenudson et al., Clin Cancer Res 16(5):1561-1571 (2010).

[0823] In one embodiment, an antigen binding domain against polysialic acid is an antigen binding portion, e.g., CDRs, of an antibody described in, e.g., Nagae et al., J Biol Chem 288(47):33784-33796 (2013).

[0824] In one embodiment, an antigen binding domain against PLAC1 is an antigen binding portion, e.g., CDRs, of an antibody described in, e.g., Ghods et al., Biotechnol Appl Biochem 2013 doi:10.1002/bab.1177.

[0825] In one embodiment, an antigen binding domain against GloboH is an antigen binding portion of the antibody VK9; or an antibody described in, e.g., Kudryashov V et al, Glycoconj J. 15(3):243-9 (1998), Lou et al., Proc Natl Acad Sci USA 111(7):2482-2487 (2014); MBr1: Bremer E-G et al. J Biol Chem 259:14773-14777 (1984).

[0826] In one embodiment, an antigen binding domain against NY-BR-1 is an antigen binding portion, e.g., CDRs of an antibody described in, e.g., Jager et al., Appl Immunohistochem Mol Morphol 15(1):77-83 (2007).

[0827] In one embodiment, an antigen binding domain against WT-1 is an antigen binding portion, e.g., CDRs, of an antibody described in, e.g., Dao et al., Sci Transl Med 5(176):176ra33 (2013); or WO2012/135854.

[0828] In one embodiment, an antigen binding domain against MAGE-A1 is an antigen binding portion, e.g., CDRs, of an antibody described in, e.g., Willemsen et al., J Immunol 174(12):7853-7858 (2005) (TCR-like scFv).

[0829] In one embodiment, an antigen binding domain against sperm protein 17 is an antigen binding portion, e.g., CDRs, of an antibody described in, e.g., Song et al., Target Oncol 2013 Aug. 14 (PMID: 23943313); Song et al., Med Oncol 29(4):2923-2931 (2012).

[0830] In one embodiment, an antigen binding domain against Tie 2 is an antigen binding portion, e.g., CDRs, of the antibody AB33 (Cell Signaling Technology).

[0831] In one embodiment, an antigen binding domain against MAD-CT-2 is an antigen binding portion, e.g., CDRs, of an antibody described in, e.g., PMID: 2450952; U.S. Pat. No. 7,635,753.

[0832] In one embodiment, an antigen binding domain against Fos-related antigen 1 is an antigen binding portion, e.g., CDRs, of the antibody 12F9 (Novus Biologicals).

[0833] In one embodiment, an antigen binding domain against MelanA/MART1 is an antigen binding portion, e.g., CDRs, of an antibody described in, EP2514766 A2; or U.S. Pat. No. 7,749,719.

[0834] In one embodiment, an antigen binding domain against sarcoma translocation breakpoints is an antigen binding portion, e.g., CDRs, of an antibody described in, e.g., Luo et al, EMBO Mol. Med. 4(6):453-461 (2012).

[0835] In one embodiment, an antigen binding domain against TRP-2 is an antigen binding portion, e.g., CDRs, of an antibody described in, e.g., Wang et al, J Exp Med. 184(6):2207-16 (1996).

[0836] In one embodiment, an antigen binding domain against CYP1B1 is an antigen binding portion, e.g., CDRs, of an antibody described in, e.g., Maecker et al, Blood 102 (9): 3287-3294 (2003).

[0837] In one embodiment, an antigen binding domain against RAGE-1 is an antigen binding portion, e.g., CDRs, of the antibody MAB5328 (EMD Millipore).

[0838] In one embodiment, an antigen binding domain against human telomerase reverse transcriptase is an antigen binding portion, e.g., CDRs, of the antibody cat no: LS-B95-100 (Lifespan Biosciences)

[0839] In one embodiment, an antigen binding domain against intestinal carboxyl esterase is an antigen binding portion, e.g., CDRs, of the antibody 4F12: cat no: LS-B6190-50 (Lifespan Biosciences).

[0840] In one embodiment, an antigen binding domain against mut hsp70-2 is an antigen binding portion, e.g., CDRs, of the antibody Lifespan Biosciences: monoclonal: cat no: LS-C133261-100 (Lifespan Biosciences).

[0841] In one embodiment, an antigen binding domain against CD79a is an antigen binding portion, e.g., CDRs, of the antibody Anti-CD79a antibody [HM47/A9] (ab3121), available from Abcam; antibody CD79A Antibody #3351 available from Cell Signalling Technology; or antibody HPA017748-Anti-CD79A antibody produced in rabbit, available from Sigma Aldrich.

[0842] In one embodiment, an antigen binding domain against CD79b is an antigen binding portion, e.g., CDRs, of the antibody polatuzumab vedotin, anti-CD79b described in Dornan et al., “Therapeutic potential of an anti-CD79b antibody-drug conjugate, anti-CD79b-vc-MMAE, for the treatment of non-Hodgkin lymphoma” Blood. 2009 Sep. 24; 114(13):2721-9. doi: 10.1182/blood-2009-02-205500. Epub 2009 Jul. 24, or the bispecific antibody Anti-CD79b/CD3 described in “4507 Pre-Clinical Characterization of T Cell-Dependent Bispecific Antibody Anti-CD79b/CD3 As a Potential Therapy for B Cell Malignancies” Abstracts of 56^{th} ASH Annual Meeting and Exposition, San Francisco, Calif. Dec. 6-9, 2014.

[0843] In one embodiment, an antigen binding domain against CD72 is an antigen binding portion, e.g., CDRs, of the antibody J3-109 described in Myers, and Uckun, “An anti-CD72 immunotoxin against therapy-refractory B-lineage acute lymphoblastic leukemia.” Leuk Lymphoma. 1995 June; 18(1-2):119-22, or anti-CD72 (10D6.8.1, mlgG1) described in Polson et al., “Antibody-Drug Conjugates for the Treatment of Non-Hodgkin's Lymphoma: Target and Linker-Drug Selection” Cancer Res Mar. 15, 2009 69; 2358.

[0844] In one embodiment, an antigen binding domain against LAIR1 is an antigen binding portion, e.g., CDRs, of the antibody ANT-301 LAIR1 antibody, available from ProSpec; or anti-human CD305 (LAIR1) Antibody, available from BioLegend.

[0845] In one embodiment, an antigen binding domain against FCAR is an antigen binding portion, e.g., CDRs, of the antibody CD89/FCARAntibody (Catalog#10414-H08H), available from Sino Biological Inc.

[0846] In one embodiment, an antigen binding domain against LILRA2 is an antigen binding portion, e.g., CDRs, of the antibody LILRA2 monoclonal antibody (M17), clone 3C7, available from Abnova, or Mouse Anti-LILRA2 antibody, Monoclonal (2D7), available from Lifespan Biosciences.

[0847] In one embodiment, an antigen binding domain against CD300LF is an antigen binding portion, e.g., CDRs, of the antibody Mouse Anti-CMRF35-like molecule 1 antibody, Monoclonal[UP-D2], available from BioLegend, or Rat Anti-CMRF35-like molecule 1 antibody, Monoclonal[234903], available from R&D Systems.

[0848] In one embodiment, an antigen binding domain against CLEC12A is an antigen binding portion, e.g., CDRs, of the antibody Bispecific T cell Engager (BiTE) scFv-antibody and ADC described in Noordhuis et al., “Targeting of CLEC12A In Acute Myeloid Leukemia by Antibody-Drug-Conjugates and Bispecific CLL-1xCD3 BiTE Antibody” 53^{rd} ASH Annual Meeting and Exposition, Dec. 10-13, 2011, and MCLA-117 (Merus).

[0849] In one embodiment, an antigen binding domain against BST2 (also called CD317) is an antigen binding portion, e.g., CDRs, of the antibody Mouse Anti-CD317 antibody, Monoclonal[3H4], available from Antibodies-Online or Mouse Anti-CD317 antibody, Monoclonal[696739], available from R&D Systems.

[0850] In one embodiment, an antigen binding domain against EMR2 (also called CD312) is an antigen binding portion, e.g., CDRs, of the antibody Mouse Anti-CD312 antibody, Monoclonal[LS-B8033] available from Lifespan Biosciences, or Mouse Anti-CD312 antibody, Monoclonal[494025] available from R&D Systems.

[0851] In one embodiment, an antigen binding domain against LY75 is an antigen binding portion, e.g., CDRs, of the antibody Mouse Anti-Lymphocyte antigen 75 antibody, Monoclonal[HD30] available from EMD Millipore or Mouse Anti-Lymphocyte antigen 75 antibody, Monoclonal[A15797] available from Life Technologies.

[0852] In one embodiment, an antigen binding domain against GPC3 is an antigen binding portion, e.g., CDRs, of the antibody hGC33 described in Nakano K, Ishiguro T, Konishi H, et al. Generation of a humanized anti-glypican 3 antibody by CDR grafting and stability optimization. Anticancer Drugs. 2010 November; 21(10):907-916, or MDX-1414, HN3, or YP7, all three of which are described in Feng et al., “Glypican-3 antibodies: a new therapeutic target for liver cancer.” FEBS Lett. 2014 Jan. 21; 588(2):377-82.

[0853] In one embodiment, an antigen binding domain against FCRL5 is an antigen binding portion, e.g., CDRs, of the anti-FcRL5 antibody described in Elkins et al., “FcRL5 as a target of antibody-drug conjugates for the treatment of multiple myeloma” Mol Cancer Ther. 2012 October; 11(10):2222-32.

[0854] In one embodiment, an antigen binding domain against IGLL1 is an antigen binding portion, e.g., CDRs, of the antibody Mouse Anti-Immunoglobulin lambda-like polypeptide 1 antibody, Monoclonal[AT1G4] available from Lifespan Biosciences, Mouse Anti-Immunoglobulin lambda-like polypeptide 1 antibody, Monoclonal[HSL11] available from BioLegend.

[0855] In one embodiment, the antigen binding domain comprises one, two three (e.g., all three) heavy chain CDRs, HC CDR1, HC CDR2 and HC CDR3, from an antibody listed above, and/or one, two, three (e.g., all three) light chain CDRs, LC CDR1, LC CDR2 and LC CDR3, from an antibody listed above. In one embodiment, the antigen binding domain comprises a heavy chain variable region and/or a variable light chain region of an antibody listed above.

[0856] In another aspect, the antigen binding domain comprises a humanized antibody or an antibody fragment. In some aspects, a non-human antibody is humanized, where specific sequences or regions of the antibody are modified to increase similarity to an antibody naturally produced in a human or fragment thereof. In one aspect, the antigen binding domain is humanized.

### Bispecific CARs

[0857] In certain embodiments, the antigen binding domain is a bi- or multi-specific molecule (e.g., a multispecific antibody molecule). In an embodiment a multispecific antibody molecule is a bispecific antibody molecule. A bispecific antibody has specificity for no more than two antigens. A bispecific antibody molecule is characterized by a first immunoglobulin variable domain sequence which has binding specificity for a first epitope and a second immunoglobulin variable domain sequence that has binding specificity for a second epitope. In an embodiment the first and second epitopes are on the same antigen, e.g., the same protein (or subunit of a multimeric protein). In an embodiment the first and second epitopes overlap. In an embodiment the first and second epitopes do not overlap. In an embodiment the first and second epitopes are on different antigens, e.g., different proteins (or different subunits of a multimeric protein). In an embodiment a bispecific antibody molecule comprises a heavy chain variable domain sequence and a light chain variable domain sequence which have binding specificity for a first epitope and a heavy chain variable domain sequence and a light chain variable domain sequence which have binding specificity for a second epitope. In an embodiment a bispecific antibody molecule comprises a half antibody having binding specificity for a first epitope and a half antibody having binding specificity for a second epitope. In an embodiment a bispecific antibody molecule comprises a half antibody, or fragment thereof, having binding specificity for a first epitope and a half antibody, or fragment thereof, having binding specificity for a second epitope. In an embodiment a bispecific antibody molecule comprises a scFv, or fragment thereof, have binding specificity for a first epitope and a scFv, or fragment thereof, have binding specificity for a second epitope.

[0858] In certain embodiments, the antibody molecule is a multi-specific (e.g., a bispecific or a trispecific) antibody molecule. Such molecules include bispecific fusion proteins, e.g., an expression construct containing two scFvs with a hydrophilic helical peptide linker between them and a full constant region, as described in, e.g., U.S. Pat. No. 5,563,7481; minibody constructs with linked VL and VH chains further connected with peptide spacers to an antibody hinge region and CH3 region, which can be dimerized to form bispecific/multivalent molecules, as described in, e.g., U.S. Pat. No. 5,837,821; String of VH domains (or VL domains in family members) connected by peptide linkages with crosslinkable groups at the C-terminus further associated with VL domains to form a series of FVs (or scFvs), as described in, e.g., U.S. Pat. No. 5,864,019; and single chain binding polypeptides with both a VH and a VL domain linked through a peptide linker are combined into multivalent structures through non-covalent or chemical crosslinking to form, e.g., homobivalent, heterobivalent, trivalent, and tetravalent structures using both scFV or diabody type format, as described in, e.g., U.S. Pat. No. 5,869,620. The contents of the above-referenced applications are incorporated herein by reference in their entireties.

[0859] Within each antibody or antibody fragment (e.g., scFv) of a bispecific antibody molecule, the VH can be upstream or downstream of the VL. In some embodiments, the upstream antibody or antibody fragment (e.g., scFv) is arranged with its VH (VH₁) upstream of its VL (VL₁) and the downstream antibody or antibody fragment (e.g., scFv) is arranged with its VL (VL₂) upstream of its VH (VH₂), such that the overall bispecific antibody molecule has the arrangement VH₁-VL₁VL₂-VH₂. In other embodiments, the upstream antibody or antibody fragment (e.g., scFv) is arranged with its VL (VL₁) upstream of its VH (VH₁) and the downstream antibody or antibody fragment (e.g., scFv) is arranged with its VH (VH₂) upstream of its VL (VL₂), such that the overall bispecific antibody molecule has the arrangement VL₁-VH₁-VH₂-VL₂. Optionally, a linker is disposed between the two antibodies or antibody fragments (e.g., scFvs), e.g., between VL₁ and VL₂ if the construct is arranged as VH₁-VL₁-VL₂-VH₂, or between VH₁ and VH₂ if the construct is arranged as VL₁-VH₁—VH₂-VL₂. The linker may be a linker as described herein, e.g., a (Gly₄-Ser)n linker, wherein n is 1, 2, 3, 4, 5, or 6, preferably 4 (SEQ ID NO: 890). In general, the linker between the two scFvs should be long enough to avoid mispairing between the domains of the two scFvs. Optionally, a linker is disposed between the VL and VH of the first scFv. Optionally, a linker is disposed between the VL and VH of the second scFv. In constructs that have multiple linkers, any two or more of the linkers can be the same or different. Accordingly, in some embodiments, a bispecific CAR comprises VLs, VHs, and optionally one or more linkers in an arrangement as described herein.

### Transmembrane Domains

[0860] With respect to the transmembrane domain, in various embodiments, a chimeric molecule of the invention (e.g., a CAR) can be designed to comprise a transmembrane domain that is attached to the extracellular domain of the chimeric molecule. A transmembrane domain can include one or more additional amino acids adjacent to the transmembrane region, e.g., one or more amino acid associated with the extracellular region of the protein from which the transmembrane was derived (e.g., 1, 2, 3, 4, 5, 6, 7, 8, 9, 10 up to 15 amino acids of the extracellular region) and/or one or more additional amino acids associated with the intracellular region of the protein from which the transmembrane protein is derived (e.g., 1, 2, 3, 4, 5, 6, 7, 8, 9, 10 up to 15 amino acids of the intracellular region). In one aspect, the transmembrane domain is one that is associated with one of the other domains of the chimeric protein (e.g., CAR) e.g., in one embodiment, the transmembrane domain may be from the same protein that the signaling domain, costimulatory domain or the hinge domain is derived from. In another aspect, the transmembrane domain is not derived from the same protein that any other domain of the chimeric protein (e.g., CAR) is derived from. In some instances, the transmembrane domain can be selected or modified by amino acid substitution to avoid binding of such domains to the transmembrane domains of the same or different surface membrane proteins, e.g., to minimize interactions with other members of the receptor complex. In one aspect, the transmembrane domain is capable of homodimerization with another CAR on the cell surface of a CAR-expressing cell. In a different aspect, the amino acid sequence of the transmembrane domain may be modified or substituted so as to minimize interactions with the binding domains of the native binding partner present in the same CAR-expressing cell.

[0861] The transmembrane domain may be derived either from a natural or from a recombinant source. Where the source is natural, the domain may be derived from any membrane-bound or transmembrane protein. In one aspect the transmembrane domain is capable of signaling to the intracellular domain(s) whenever the CAR has bound to a target. A transmembrane domain of particular use in this invention may include at least the transmembrane region(s) of e.g., the alpha, beta or zeta chain of the T-cell receptor, CD28, CD27, CD3 epsilon, CD45, CD4, CD5, CD8, CD9, CD16, CD22, CD33, CD37, CD64, CD80, CD86, CD134, CD137, CD154. In some embodiments, a transmembrane domain may include at least the transmembrane region(s) of, e.g., KIRDS2, OX40, CD2, CD27, LFA-1 (CD11a, CD18), ICOS (CD278), 4-1BB (CD137), GITR, CD40, BAFFR, HVEM (LIGHTR), SLAMF7, NKp80 (KLRF1), NKp44, NKp30, NKp46, CD160, CD19, IL2R beta, IL2R gamma, IL7R a, ITGA1, VLA1, CD49a, ITGA4, IA4, CD49D, ITGA6, VLA-6, CD49f, ITGAD, CD11d, ITGAE, CD103, ITGAL, CD11a, LFA-1, ITGAM, CD11b, ITGAX, CD11c, ITGB1, CD29, ITGB2, CD18, LFA-1, ITGB7, TNFR2, DNAM1 (CD226), SLAMF4 (CD244, 2B4), CD84, CD96 (Tactile), CEACAM1, CRTAM, Ly9 (CD229), CD160 (BY55), PSGL1, CD100 (SEMA4D), SLAMF6 (NTB-A, Ly108), SLAM (SLAMF1, CD150, IPO-3), BLAME (SLAMF8), SELPLG (CD162), LTBR, PAG/Cbp, NKG2D, or NKG2C.

[0862] In some instances, the transmembrane domain can be attached to the extracellular region of the CAR, e.g., the antigen binding domain of the CAR, via a hinge, e.g., a hinge from a human protein. For example, in one embodiment, the hinge can be a human Ig (immunoglobulin) hinge (e.g., an IgG4 hinge, an IgD hinge), a GS linker (e.g., a GS linker described herein), a KIR2DS2 hinge or a CD8a hinge. In one embodiment, the hinge or spacer comprises (e.g., consists of) the amino acid sequence of SEQ ID NO: 4. In one aspect, the transmembrane domain comprises (e.g., consists of) a transmembrane domain of SEQ ID NO: 12.

[0863] In certain embodiments, the encoded transmembrane domain comprises an amino acid sequence of a CD8 transmembrane domain having at least one, two or three modifications but not more than 20, 10 or 5 modifications of an amino acid sequence of SEQ ID NO: 12, or a sequence with 95-99% identity to an amino acid sequence of SEQ ID NO: 12. In one embodiment, the encoded transmembrane domain comprises the sequence of SEQ ID NO: 12.

[0864] In other embodiments, the nucleic acid molecule encoding the CAR comprises a nucleotide sequence of a CD8 transmembrane domain, e.g., comprising the sequence of SEQ ID NO: 13, or a sequence with 95-99% identity thereof.

[0865] In certain embodiments, the encoded antigen binding domain is connected to the transmembrane domain by a hinge region. In one embodiment, the encoded hinge region comprises the amino acid sequence of a CD8 hinge, e.g., SEQ ID NO: 4; or the amino acid sequence of an IgG4 hinge, e.g., SEQ ID NO: 6, or a sequence with 95-99% identity to SEQ ID NO:4 or 6. In other embodiments, the nucleic acid sequence encoding the hinge region comprises a sequence of SEQ ID NO: 5 or SEQ ID NO: 7, corresponding to a CD8 hinge or an IgG4 hinge, respectively, or a sequence with 95-99% identity to SEQ ID NO:5 or 7.

[0866] In one aspect, the hinge or spacer comprises an IgG4 hinge. For example, in one embodiment, the hinge or spacer comprises a hinge of the amino acid sequence:

(SEQ ID NO: 6)

ESKYGPPCPPCPAPEFLGGPSVFLFPPKPKDTLMISRTPEVTCVVVDVSQ
EDPEVQFNWYVDGVEVHNAKTKPREEQFNSTYRVVSVLTVLHQDWLNGKE
YKCKVSNKGLPSSIEKTISKAKGQPREPQVYTLPPSQEEMTKNQVSLTCL
VKGFYPSDIAVEWESNGQPENNYKTTPPVLDSDGSFFLYSRLTVDKSRWQ
EGNVFSCSVMHEALHNHYTQKSLSLSLGKM.

[0867] In some embodiments, the hinge or spacer comprises a hinge encoded by a nucleotide sequence of:

(SEQ ID NO: 7)

GAGAGCAAGTACGGCCCTCCCTGCCCCCCTTGCCCTGCCCCCGAGTTCCT
GGGCGGACCCAGCGTGTTCCTGTTCCCCCCCAAGCCCAAGGACACCCTGA
TGATCAGCCGGACCCCCGAGGTGACCTGTGTGGTGGTGGACGTGTCCCAG
GAGGACCCCGAGGTCCAGTTCAACTGGTACGTGGACGGCGTGGAGGTGCA
CAACGCCAAGACCAAGCCCCGGGAGGAGCAGTTCAATAGCACCTACCGGG
TGGTGTCCGTGCTGACCGTGCTGCACCAGGACTGGCTGAACGGCAAGGAA
TACAAGTGTAAGGTGTCCAACAAGGGCCTGCCCAGCAGCATCGAGAAAAC
CATCAGCAAGGCCAAGGGCCAGCCTCGGGAGCCCCAGGTGTACACCCTGC
CCCCTAGCCAAGAGGAGATGACCAAGAACCAGGTGTCCCTGACCTGCCTG
GTGAAGGGCTTCTACCCCAGCGACATCGCCGTGGAGTGGGAGAGCAACGG
CCAGCCCGAGAACAACTACAAGACCACCCCCCCTGTGCTGGACAGCGACG
GCAGCTTCTTCCTGTACAGCCGGCTGACCGTGGACAAGAGCCGGTGGCAG
GAGGGCAACGTCTTTAGCTGCTCCGTGATGCACGAGGCCCTGCACAACCA
CTACACCCAGAAGAGCCTGAGCCTGTCCCTGGGCAAGATG.

[0868] In one aspect, the hinge or spacer comprises an IgD hinge. For example, in one embodiment, the hinge or spacer comprises a hinge of the amino acid sequence

(SEQ ID NO: 8)
RWPESPKAQASSVPTAQPQAEGSLAKATTAPATTRNTGRGGEEKKKEKEK
EEQEERETKTPECPSHTQPLGVYLLTPAVQDLWLRDKATFTCFVVGSDLK
DAHLTWEVAGKVPTGGVEEGLLERHSNGSQSQHSRLTLPRSLWNAGTSVT
CTLNHPSLPPQRLMALREPAAQAPVKLSLNLLASSDPPEAASWLLCEVSG
FSPPNILLMWLEDQREVNTSGFAPARPPPQPGSTTFWAWSVLRVPAPPSP
QPATYTCVVSHEDSRTLLNASRSLEVSYVTDH.

[0869] In some embodiments, the hinge or spacer comprises a hinge encoded by a nucleotide sequence of:

(SEQ ID NO: 9)
AGGTGGCCCGAAAGTCCCAAGGCCCAGGCATCTAGTGTTCCTACTGCACA
GCCCCAGGCAGAAGGCAGCCTAGCCAAAGCTACTACTGCACCTGCCACTA
CGCGCAATACTGGCCGTGGCGGGGAGGAGAAGAAAAAGGAGAAAGAGAAA
GAAGAACAGGAAGAGAGGGAGACCAAGACCCCTGAATGTCCATCCCATAC
CCAGCCGCTGGGCGTCTATCTCTTGACTCCCGCAGTACAGGACTTGTGGC
TTAGAGATAAGGCCACCTTTACATGTTTCGTCGTGGGCTCTGACCTGAAG
GATGCCCATTTGACTTGGGAGGTTGCCGGAAAGGTACCCACAGGGGGGGT
TGAGGAAGGGTTGCTGGAGCGCCATTCCAATGGCTCTCAGAGCCAGCACT
CAAGACTCACCCTTCCGAGATCCCTGTGGAACGCCGGGACCTCTGTCACA
TGTACTCTAAATCATCCTAGCCTGCCCCCACAGCGTCTGATGGCCCTTAG
AGAGCCAGCCGCCCAGGCACCAGTTAAGCTTAGCCTGAATCTGCTCGCCA
GTAGTGATCCCCCAGAGGCCGCCAGCTGGCTCTTATGCGAAGTGTCCGGC
TTTAGCCCGCCCAACATCTTGCTCATGTGGCTGGAGGACCAGCGAGAAGT
GAACACCAGCGGCTTCGCTCCAGCCCGGCCCCCACCCCAGCCGGGTTCTA
CCACATTCTGGGCCTGGAGTGTCTTAAGGGTCCCAGCACCACCTAGCCCC
CAGCCAGCCACATACACCTGTGTTGTGTCCCATGAAGATAGCAGGACCCT
GCTAAATGCTTCTAGGAGTCTGGAGGTTTCCTACGTGACTGACCATT.

[0870] In one aspect, the transmembrane domain may be recombinant, in which case it will comprise predominantly hydrophobic residues such as leucine and valine. In one aspect a triplet of phenylalanine, tryptophan and valine can be found at each end of a recombinant transmembrane domain.

[0871] Optionally, a short oligo- or polypeptide linker, between 2 and 10 amino acids in length may form the linkage between the transmembrane domain and the cytoplasmic region of the CAR. A glycine-serine doublet provides a particularly suitable linker. For example, in one aspect, the linker comprises the amino acid sequence of GGGGSGGGGS (SEQ ID NO:10). In some embodiments, the linker is encoded by a nucleotide sequence of GGTGGCGGAGGTTCTGGAGGTGGAGGTTCC (SEQ ID NO:11).

[0872] In one aspect, the hinge or spacer comprises a KIR2DS2 hinge.

### Signaling Domains

[0873] In embodiments of the invention having an intracellular signaling domain, such a domain can contain, e.g., one or more of a primary signaling domain and/or a costimulatory signaling domain. In some embodiments, the intracellular signaling domain comprises a sequence encoding a primary signaling domain. In some embodiments, the intracellular signaling domain comprises a costimulatory signaling domain. In some embodiments, the intracellular signaling domain comprises a a primary signaling domain and a costimulatory signaling domain.

[0874] The intracellular signaling sequences within the cytoplasmic portion of the CAR of the invention may be linked to each other in a random or specified order. Optionally, a short oligo- or polypeptide linker, for example, between 2 and 10 amino acids (e.g., 2, 3, 4, 5, 6, 7, 8, 9, or 10 amino acids) in length may form the linkage between intracellular signaling sequences. In one embodiment, a glycine-serine doublet can be used as a suitable linker. In one embodiment, a single amino acid, e.g., an alanine, a glycine, can be used as a suitable linker.

[0875] In one aspect, the intracellular signaling domain is designed to comprise two or more, e.g., 2, 3, 4, 5, or more, costimulatory signaling domains. In an embodiment, the two or more, e.g., 2, 3, 4, 5, or more, costimulatory signaling domains, are separated by a linker molecule, e.g., a linker molecule described herein. In one embodiment, the intracellular signaling domain comprises two costimulatory signaling domains. In some embodiments, the linker molecule is a glycine residue. In some embodiments, the linker is an alanine residue.

### Primary Signaling Domains

[0876] A primary signaling domain regulates primary activation of the TCR complex either in a stimulatory way, or in an inhibitory way. Primary intracellular signaling domains that act in a stimulatory manner may contain signaling motifs which are known as immunoreceptor tyrosine-based activation motifs or ITAMs.

[0877] Examples of ITAM containing primary intracellular signaling domains that are of particular use in the invention include those of CD3 zeta, common FcR gamma (FCER1G), Fc gamma RIIa, FcR beta (Fc Epsilon R1b), CD3 gamma, CD3 delta, CD3 epsilon, CD79a, CD79b, DAP10, and DAP12. In one embodiment, a CAR of the invention comprises an intracellular signaling domain, e.g., a primary signaling domain of CD3-zeta.

[0878] In one embodiment, the encoded primary signaling domain comprises a functional signaling domain of CD3 zeta. The encoded CD3 zeta primary signaling domain can comprise an amino acid sequence having at least one, two or three modifications but not more than 20, 10 or 5 modifications of an amino acid sequence of SEQ ID NO: 18 or SEQ ID NO: 20, or a sequence with 95-99% identity to an amino acid sequence of SEQ ID NO:18 or SEQ ID NO: 20. In some embodiments, the encoded primary signaling domain comprises a sequence of SEQ ID NO:18 or SEQ ID NO: 20. In other embodiments, the nucleic acid sequence encoding the primary signaling domain comprises a sequence of SEQ ID NO:19 or SEQ ID NO: 21, or a sequence with 95-99% identity thereof.

### Costimulatory Signaling Domains

[0879] In some embodiments, the encoded intracellular signaling domain comprises a a costimulatory signaling domain. For example, the intracellular signaling domain can comprise a primary signaling domain and a costimulatory signaling domain. In some embodiments, the encoded costimulatory signaling domain comprises a functional signaling domain of a protein chosen from one or more of CD27, CD28, 4-1BB (CD137), OX40, CD30, CD40, PD-1, ICOS, lymphocyte function-associated antigen-1 (LFA-1), CD2, CD7, LIGHT, NKG2C, B7-H3, a ligand that specifically binds with CD83, CDS, ICAM-1, GITR, BAFFR, HVEM (LIGHTR), SLAMF7, NKp80 (KLRF1), CD160, CD19, CD4, CD8alpha, CD8beta, IL2R beta, IL2R gamma, IL7R alpha, ITGA4, VLA1, CD49a, ITGA4, IA4, CD49D, ITGA6, VLA-6, CD49f, ITGAD, CD11d, ITGAE, CD103, ITGAL, CD11a, LFA-1, ITGAM, CD11b, ITGAX, CD11c, ITGB1, CD29, ITGB2, CD18, LFA-1, ITGB7, TNFR2, TRANCE/RANKL, DNAM1 (CD226), SLAMF4 (CD244, 2B4), CD84, CD96 (Tactile), CEACAM1, CRTAM, Ly9 (CD229), CD160 (BY55), PSGL1, CD100 (SEMA4D), CD69, SLAMF6 (NTB-A, Ly108), SLAM (SLAMF1, CD150, IPO-3), BLAME (SLAMF8), SELPLG (CD162), LTBR, LAT, GADS, SLP-76, PAG/Cbp, NKp44, NKp30, NKp46, and NKG2D.

[0880] In certain embodiments, the encoded costimulatory signaling domain comprises an amino acid sequence having at least one, two or three modifications but not more than 20, 10 or 5 modifications of an amino acid sequence of SEQ ID NO:14 or SEQ ID NO: 16, or a sequence with 95-99% identity to an amino acid sequence of SEQ ID NO:14 or SEQ ID NO: 16. In one embodiment, the encoded costimulatory signaling domain comprises a sequence of SEQ ID NO: 14 or SEQ ID NO: 16. In other embodiments, the nucleic acid sequence encoding the costimulatory signaling domain comprises a sequence of SEQ ID NO:15 or SEQ ID NO: 17, or a sequence with 95-99% identity thereof.

[0881] In other embodiments, the encoded intracellular domain comprises the sequence of SEQ ID NO:

[0882] 14 or SEQ ID NO: 16, and the sequence of SEQ ID NO: 18 or SEQ ID NO: 20, wherein the sequences comprising the intracellular signaling domain are expressed in the same frame and as a single polypeptide chain.

[0883] In certain embodiments, the nucleic acid sequence encoding the intracellular signaling domain comprises a sequence of SEQ ID NO:15 or SEQ ID NO: 17, or a sequence with 95-99% identity thereof, and a sequence of SEQ ID NO:19 or SEQ ID NO:21, or a sequence with 95-99% identity thereof.

[0884] In some embodiments, the nucleic acid molecule further encodes a leader sequence. In one embodiment, the leader sequence comprises the sequence of SEQ ID NO: 2.

[0885] In one aspect, the intracellular signaling domain is designed to comprise the signaling domain of CD3-zeta and the signaling domain of CD28. In one aspect, the intracellular signaling domain is designed to comprise the signaling domain of CD3-zeta and the signaling domain of 4-1BB. In one aspect, the signaling domain of 4-1BB is a signaling domain of SEQ ID NO: 14. In one aspect, the signaling domain of CD3-zeta is a signaling domain of SEQ ID NO: 18.

[0886] In one aspect, the intracellular signaling domain is designed to comprise the signaling domain of CD3-zeta and the signaling domain of CD27. In one aspect, the signaling domain of CD27 comprises an amino acid sequence of QRRKYRSNKGESPVEPAEPCRYSCPREEEGSTIPIQEDYRKPEPACSP (SEQ ID NO:16). In one aspect, the signaling domain of CD27 is encoded by a nucleic acid sequence of:

(SEQ ID NO: 17)
AGGAGTAAGAGGAGCAGGCTCCTGCACAGTGACTACATGAACATGACTCC
CCGCCGCCCCGGGCCCACCCGCAAGCATTACCAGCCCTATGCCCCACCAC
GCGACTTCGCAGCCTATCGCTCC.

### Exemplary CAR Molecules

[0887] The CAR molecules disclosed herein can comprise a binding domain that binds to a target, e.g., a target as described herein; a transmembrane domain, e.g., a transmembrane domain as described herein; and an intracellular signaling domain, e.g., an intracellular domain as described herein. In embodiments, the binding domain comprises a heavy chain complementary determining region 1 (HC CDR1), a heavy chain complementary determining region 2 (HC CDR2), and a heavy chain complementary determining region 3 (HC CDR3) of a heavy chain binding domain described herein, and/or a light chain complementary determining region 1 (LC CDR1), a light chain complementary determining region 2 (LC CDR2), and a light chain complementary determining region 3 (LC CDR3) of a light chain binding domain described herein.

[0888] In other embodiments, the CAR molecule comprises a CD19 CAR molecule described herein, e.g., a CD19 CAR molecule described in US-2015-0283178-A1, e.g., CTL019. In embodiments, the CD19 CAR comprises an amino acid, or has a nucleotide sequence shown in US-2015-0283178-A1, incorporated herein by reference, or a sequence substantially identical thereto (e.g., at least 85%, 90%, 95% or more identical thereto).

[0889] In one embodiment, the CAR T cell that specifically binds to CD19 has the USAN designation TISAGENLECLEUCEL-T. CTL019 is made by a gene modification of T cells is mediated by stable insertion via transduction with a self-inactivating, replication deficient Lentiviral (LV) vector containing the CTL019 transgene under the control of the EF-1 alpha promoter. CTL019 can be a mixture of transgene positive and negative T cells that are delivered to the subject on the basis of percent transgene positive T cells.

[0890] In other embodiments, the CD19 CAR includes a CAR molecule, or an antigen binding domain (e.g., a humanized antigen binding domain) according to Table 3 of WO2014/153270, incorporated herein by reference. The amino acid and nucleotide sequences encoding the CD19 CAR molecules and antigen binding domains (e.g., including one, two, three VH CDRs; and one, two, three VL CDRs according to Kabat or Chothia), are specified in WO2014/153270. In embodiments, the CD19 CAR comprises an amino acid, or has a nucleotide sequence shown in WO2014/153270 incorporated herein by reference, or a sequence substantially identical to any of the aforesaid sequences (e.g., at least 85%, 90%, 95% or more identical to any of the aforesaid CD19 CAR sequences).

[0891] In one embodiment, the parental murine scFv sequence is the CAR19 construct provided in PCT publication WO2012/079000 (incorporated herein by reference) and provided herein in Table 9. In one embodiment, the anti-CD19 binding domain is a scFv described in WO2012/079000 and provided herein in Table 9.

[0892] In one embodiment, the CD19 CAR comprises an amino acid sequence provided as SEQ ID NO: 12 in PCT publication WO2012/079000. In embodiment, the amino acid sequence is:

(SEQ ID NO: 891)
MALPVTALLLPLALLLHAARPdiqmtqttsslsaslgdrvtiscrasqdi
skylnwyqqkpdgtvklliyhtsrlhsgvpsrfsgsgsgtdysltisnle
qediatyfcqqgntlpytfgggtkleitggggsggggsggggsevklqes
gpglvapsqslsvtctvsgvslpdygvswirqpprkglewlgviwgsett
yynsalksrltiikdnsksqvflkmnslqtddtaiyycakhyyyggsyam
dywgqgtsvtvsstttpaprpptpaptiasqplslrpeacrpaaggavht
rgldfacdiyiwaplagtcgvlllslvitlyckrgrkkllyifkqpfmrp
vqttqeedgcscrfpeeeeggcelrvkfsrsadapaykqgqnqlynelnl
grreeydvldkrrgrdpemggkprrknpqeglynelqkdkmaeayseigm
kgerrrgkghdglyqglstatkdtydalhmqalppr, or a
sequence substantially identical thereto (e.g., at
least 85%, 90% or 95% or higher identical
thereto), with or without the signal peptide
sequence indicated in capital letters.

[0893] In embodiment, the amino acid sequence is:

(SEQ ID NO: 892)
diqmtqttsslsaslgdrvtiscrasqdiskylnwyqqkpdgtvklliyh
tsrlhsgvpsrfsgsgsgtdysltisnleqediatyfcqqgntlpytfgg
gtkleitggggsggggsggggsevklqesgpglvapsqslsvtctvsgvs
lpdygvswirqpprkglewlgviwgsettyynsalksrltiikdnsksqv
flkmnslqtddtaiyycakhyyyggsyamdywgqgtsvtvsstttpaprp
ptpaptiasqplslrpeacrpaaggavhtrgldfacdiyiwaplagtcgv
lllslvitlyckrgrkkllyifkqpfmrpvqttqeedgcscrfpeeeegg
celrvkfsrsadapaykqgqnqlynelnlgrreeydvldkrrgrdpemgg
kprrknpqeglynelqkdkmaeayseigmkgerrrgkghdglyqglstat
kdtydalhmqalppr, or a sequence substantially
homologous thereto (e.g., at least 85%, 90% or
95% or higher identical thereto).

[0894] In embodiments, the CAR molecule is a CD19 CAR molecule described herein, e.g., a humanized CAR molecule described herein, e.g., a humanized CD19 CAR molecule of Table 6-9 or having CDRs as set out in Tables 10A and 10B.

[0895] In embodiments, the CAR molecule is a CD19 CAR molecule described herein, e.g., a murine CAR molecule described herein, e.g., a murine CD19 CAR molecule of Table 9 or having CDRs as set out in Tables 10A and 10B.

[0896] In some embodiments, the CAR molecule comprises one, two, and/or three CDRs from the heavy chain variable region and/or one, two, and/or three CDRs from the light chain variable region of the murine or humanized CD19 CAR of Table 10A and 10B.

[0897] In one embodiment, the antigen binding domain comprises one, two three (e.g., all three) heavy chain CDRs, HC CDR1, HC CDR2 and HC CDR3, from an antibody listed herein, and/or one, two, three (e.g., all three) light chain CDRs, LC CDR1, LC CDR2 and LC CDR3, from an antibody listed herein. In one embodiment, the antigen binding domain comprises a heavy chain variable region and/or a variable light chain region of an antibody listed or described herein.

[0898] Exemplary CD19 CARs include any of the CD19 CARs or anti-CD19 binding domains described herein, e.g., in one or more tables (e.g., Tables 6-9) described herein (e.g., or an anti-CD19 CAR described in Xu et al. Blood 123.24(2014):3750-9; Kochenderfer et al. Blood 122.25(2013):4129-39, Cruz et al. Blood 122.17(2013):2965-73, NCT00586391, NCT01087294, NCT02456350, NCT00840853, NCT02659943, NCT02650999, NCT02640209, NCT01747486, NCT02546739, NCT02656147, NCT02772198, NCT00709033, NCT02081937, NCT00924326, NCT02735083, NCT02794246, NCT02746952, NCT01593696, NCT02134262, NCT01853631, NCT02443831, NCT02277522, NCT02348216, NCT02614066, NCT02030834, NCT02624258, NCT02625480, NCT02030847, NCT02644655, NCT02349698, NCT02813837, NCT02050347, NCT01683279, NCT02529813, NCT02537977, NCT02799550, NCT02672501, NCT02819583, NCT02028455, NCT01840566, NCT01318317, NCT01864889, NCT02706405, NCT01475058, NCT01430390, NCT02146924, NCT02051257, NCT02431988, NCT01815749, NCT02153580, NCT01865617, NCT02208362, NCT02685670, NCT02535364, NCT02631044, NCT02728882, NCT02735291, NCT01860937, NCT02822326, NCT02737085, NCT02465983, NCT02132624, NCT02782351, NCT01493453, NCT02652910, NCT02247609, NCT01029366, NCT01626495, NCT02721407, NCT01044069, NCT00422383, NCT01680991, NCT02794961, or NCT02456207, each of which is incorporated herein by reference in its entirety.

[0899] Exemplary CD19 CAR and antigen binding domain constructs that can be used in the methods described herein are shown in Tables 6-9. The light and heavy chain CDR sequences according to Kabat are shown by the bold and underlined text, and are also summarized in Tables 9 and 10A-10B below. The location of the signal sequence and histidine tag are also underlined. In embodiments, the CD19 CAR sequences and antigen binding fragments thereof do not include the signal sequence and/or histidine tag sequences.

[0900] In embodiments, the CD19 CAR comprises an anti-CD19 binding domain (e.g., murine or humanized anti-CD19 binding domain), a transmembrane domain, and an intracellular signaling domain, and wherein said anti-CD19 binding domain comprises a heavy chain complementary determining region 1 (HC CDR1), a heavy chain complementary determining region 2 (HC CDR2), and a heavy chain complementary determining region 3 (HC CDR3) of any anti-CD19 heavy chain binding domain amino acid sequences listed in Tables 6-9 and 10A-10B, or a sequence at least 85%, 90%, 95% or more identical thereto (e.g., having less than 5, 4, 3, 2 or 1 amino acid substitutions, e.g., conservative substitutions).

[0901] In one embodiment, the anti-CD19 binding domain comprises a light chain variable region described herein (e.g., in Tables 6-9) and/or a heavy chain variable region described herein (e.g., in Table 9), or a sequence at least 85%, 90%, 95% or more identical thereto.

[0902] In one embodiment, the encoded anti-CD19 binding domain is a scFv comprising a light chain and a heavy chain of an amino acid sequence of Tables 6-9, or a sequence at least 85%, 90%, 95% or more identical thereto.

[0903] In an embodiment, the human or humanized anti-CD19 binding domain (e.g., an scFv) comprises: a light chain variable region comprising an amino acid sequence having at least one, two or three modifications (e.g., substitutions, e.g., conservative substitutions) but not more than 30, 20 or 10 modifications (e.g., substitutions, e.g., conservative substitutions) of an amino acid sequence of a light chain variable region provided in Tables 6-9, or a sequence at least 85%, 90%, 95% or more identical thereto; and/or a heavy chain variable region comprising an amino acid sequence having at least one, two or three modifications (e.g., substitutions, e.g., conservative substitutions) but not more than 30, 20 or 10 modifications (e.g., substitutions, e.g., conservative substitutions) of an amino acid sequence of a heavy chain variable region provided in Tables 6-9, or a sequence at least 85%, 90%, 95% or more identical thereto.

TABLE 9
CD19 CAR Constructs

| | | |
|---|---|---|
| | SEQ ID | |
| Name | NO: | Sequence |

CAR 1

| | | |
|---|---|---|
| CAR 1 scFv | 893 | EIVMTQSPATLSLSPGERATLSCRASQDISKYLNWYQQKPGQAPRLLIYHT |
| domain | | SRLHSGIPARFSGSGSGTDYTLTISSLQPEDFAVYFCQQGNTLPYTFGQGT |
| | | KLEIKGGGGSGGGGSGGGGSQVQLQESGPGLVKPSETLSLTCTVSGVSLPD |
| | | YGVSWIRQPPGKGLEWIGVIWGSETTYYSSSLKSRVTISKDNSKNQVSLKL |
| | | SSVTAADTAVYYCAKHYYYGGSYAMDYWGQGTLVTVSS |
| 103101 | 894 | atggccctccctgtcaccgccctgctgcttccgctggctcttctgctccacgccgc |
| CAR 1 | | tcggcccgaaattgtgatgacccagtcacccgccactcttagcctttcacccggtg |
| Soluble scFv- | | agcgcgcaaccctgtcttgcagagcctcccaagacatctcaaaataccttaattgg |
| nt | | tatcaacagaagcccggacaggctcctcgccttctgatctaccacaccagccggct |
| | | ccattctggaatccctgccaggttcagcggtagcggatctgggaccgactacaccc |
| | | tcactatcagctcactgcagccagaggacttcgctgtctatttctgtcagcaaggg |
| | | aacaccctgccctacacctttggacagggcaccaagctcgagattaaaggtggagg |
| | | tggcagcggaggaggtgggtccggcggtggaggaagccaggtccaactccaagaaa |
| | | gcggaccgggtcttgtgaagccatcagaaactctttcactgacttgtactgtgagc |
| | | ggagtgtctctccccgattacggggtgtcttggatcagacagccaccggggaaggg |
| | | tctggaatggattggagtgatttggggctctgagactacttactactcttcatccc |
| | | tcaagtcacgcgtcaccatctcaaaggacaactctaagaatcaggtgtcactgaaa |
| | | ctgtcatctgtgaccgcagccgacaccgccgtgtactattgcgctaagcattacta |
| | | ttatggcgggagctacgcaatggattactggggacagggtactctggtcaccgtgt |
| | | ccagccaccaccatcatcaccatcaccat |
| 103101 | 895 | MALPVTALLLPLALLLHAARPeivmtqspatlslspgeratlscrasqdiskylnw |
| CAR 1 | | yqqkpgqaprlliyhtsrlhsgiparfsgsgsgtdytltisslqpedfavyfcqqg |
| Soluble scFv- | | ntlpytfgqgtkleikggggsggggsggggsqvqlqesgpglvkpsetlsltctvs |
| aa | | gvslpdygvswirqppgkglewigviwgsettyyssslksrvtiskdnsknqvslk |
| | | lssvtaadtavyycakhyyyggsyamdywgqgtlvtvsshhhhhhhh |
| 104875 | 896 | atggccctccctgtcaccgccctgctgcttccgctggctcttctgctccacgccgc |
| CAR 1-Full- | | tcggcccgaaattgtgatgacccagtcacccgccactcttagcctttcacccggtg |
| nt | | agcgcgcaaccctgtcttgcagagcctcccaagacatctcaaaataccttaattgg |
| | | tatcaacagaagcccggacaggctcctcgccttctgatctaccacaccagccggct |
| | | ccattctggaatccctgccaggttcagcggtagcggatctgggaccgactacaccc |
| | | tcactatcagctcactgcagccagaggacttcgctgtctatttctgtcagcaaggg |
| | | aacaccctgccctacacctttggacagggcaccaagctcgagattaaaggtggagg |
| | | tggcagcggaggaggtgggtccggcggtggaggaagccaggtccaactccaagaaa |
| | | gcggaccgggtcttgtgaagccatcagaaactctttcactgacttgtactgtgagc |
| | | ggagtgtctctccccgattacggggtgtcttggatcagacagccaccggggaaggg |
| | | tctggaatggattggagtgatttggggctctgagactacttactactcttcatccc |
| | | tcaagtcacgcgtcaccatctcaaaggacaactctaagaatcaggtgtcactgaaa |
| | | ctgtcatctgtgaccgcagccgacaccgccgtgtactattgcgctaagcattacta |
| | | ttatggcgggagctacgcaatggattactggggacagggtactctggtcaccgtgt |
| | | ccagcaccactaccccagcaccgaggccacccaccccggctcctaccatcgcctcc |
| | | cagcctctgtccctgcgtccggaggcatgtagacccgcagctggtggggccgtgca |
| | | tacccggggtcttgacttcgcctgcgatatctacatttgggcccctctggctggta |
| | | cttgcggggtcctgctgctttcactcgtgatcactctttactgtaagcgcggtcgg |
| | | aagaagctgctgtacatctttaagcaacccttcatgaggcctgtgcagactactca |
| | | agaggaggacggctgttcatgccggttcccagaggaggaggaaggcggctgcgaac |
| | | tgcgcgtgaaattcagccgcagcgcagatgctccagcctacaagcaggggcagaac |
| | | cagctctacaacgaactcaatcttggtcggagagaggagtacgacgtgctggacaa |
| | | gcggagaggacgggacccagaaatgggcgggaagccgcgcagaaagaatccccaag |
| | | agggcctgtacaacgagctccaaaaggataagatggcagaagcctatagcgagatt |
| | | ggtatgaaaggggaacgcagaagaggcaaaggccacgacggactgtaccagggact |
| | | cagcaccgccaccaaggacacctatgacgctcttcacatgcaggccctgccgcctc |
| | | gg |
| 104875 | 897 | MALPVTALLLPLALLLHAARPeivmtqspatlslspgeratlscrasqdiskylnw |
| CAR 1-Full- | | yqqkpgqaprlliyhtsrlhsgiparfsgsgsgtdytltisslqpedfavyfcqqg |
| aa | | ntlpytfgqgtkleikggggsggggsggggsqvqlqesgpglvkpsetlsltctvs |
| | | gvslpdygvswirqppgkglewigviwgsettyyssslksrvtiskdnsknqvslk |
| | | lssvtaadtavyycakhyyyggsyamdywgqgtlvtvsstttpaprpptpaptias |
| | | qplslrpeacrpaaggavhtrgldfacdiyiwaplagtcgvlllslvitlyckrgr |
| | | kkllyifkqpfmrpvqttqeedgcscrfpeeeeggcelrvkfsrsadapaykqgqn |
| | | qlynelnlgrreeydvldkrrgrdpemggkprrknpqeglynelqkdkmaeaysei |
| | | gmkgerrrgkghdglyqglstatkdtydalhmqalppr |

CAR 2

| | | |
|---|---|---|
| CAR 2 scFv | 898 | eivmtqspatlslspgeratlscrasqdiskylnwyqqkpgqaprlliyhtsrlhs |
| domain | | giparfsgsgsgtdytltisslqpedfavyfcqqgntlpytfgqgtkleikggggs |
| | | ggggsggggsqvqlqesgpglvkpsetlsltctvsgvslpdygvswirqppgkgle |
| | | wigviwgsettyyqsslksrvtiskdnsknqvslklssvtaadtavyycakhyyyg |
| | | gsyamdywgqgtlvtvss |
| 103102 | 899 | atggccctccctgtcaccgccctgctgcttccgctggctcttctgctccacgccgc |
| CAR 2- | | tcggcccgaaattgtgatgacccagtcacccgccactcttagcctttcacccggtg |
| Soluble scFv- | | agcgcgcaaccctgtcttgcagagcctcccaagacatctcaaaataccttaattgg |
| nt | | tatcaacagaagcccggacaggctcctcgccttctgatctaccacaccagccggct |
| | | ccattctggaatccctgccaggttcagcggtagcggatctgggaccgactacaccc |
| | | tcactatcagctcactgcagccagaggacttcgctgtctatttctgtcagcaaggg |
| | | aacaccctgccctacacctttggacagggcaccaagctcgagattaaaggtggagg |
| | | tggcagcggaggaggtgggtccggcggtggaggaagccaggtccaactccaagaaa |
| | | gcggaccgggtcttgtgaagccatcagaaactctttcactgacttgtactgtgagc |
| | | ggagtgtctctccccgattacggggtgtcttggatcagacagccaccggggaaggg |
| | | tctggaatggattggagtgatttggggctctgagactacttactaccaatcatccc |
| | | tcaagtcacgcgtcaccatctcaaaggacaactctaagaatcaggtgtcactgaaa |
| | | ctgtcatctgtgaccgcagccgacaccgccgtgtactattgcgctaagcattacta |
| | | ttatggcgggagctacgcaatggattactggggacagggtactctggtcaccgtgt |
| | | ccagccaccaccatcatcaccatcaccat |
| 103102 | 900 | MALPVTALLLPLALLLHAARPeivmtqspatlslspgeratlscrasqdiskylnw |
| CAR 2- | | yqqkpgqaprlliyhtsrlhsgiparfsgsgsgtdytltisslqpedfavyfcqqg |
| Soluble scFv- | | ntlpytfgqgtkleikggggsggggsggggsqvqlqesgpglvkpsetlsltctvs |
| aa | | gvslpdygvswirqppgkglewigviwgsettyyqsslksrvtiskdnsknqvslk |
| | | lssvtaadtavyycakhyyyggsyamdywgqgtlvtvsshhhhhhhh |
| 104876 | 901 | atggccctccctgtcaccgccctgctgcttccgctggctcttctgctccacgccgc |
| CAR 2-Full- | | tcggcccgaaattgtgatgacccagtcacccgccactcttagcctttcacccggtg |
| nt | | agcgcgcaaccctgtcttgcagagcctcccaagacatctcaaaataccttaattgg |
| | | tatcaacagaagcccggacaggctcctcgccttctgatctaccacaccagccggct |
| | | ccattctggaatccctgccaggttcagcggtagcggatctgggaccgactacaccc |
| | | tcactatcagctcactgcagccagaggacttcgctgtctatttctgtcagcaaggg |
| | | aacaccctgccctacacctttggacagggcaccaagctcgagattaaaggtggagg |
| | | tggcagcggaggaggtgggtccggcggtggaggaagccaggtccaactccaagaaa |
| | | gcggaccgggtcttgtgaagccatcagaaactctttcactgacttgtactgtgagc |
| | | ggagtgtctctccccgattacggggtgtcttggatcagacagccaccggggaaggg |
| | | tctggaatggattggagtgatttggggctctgagactacttactaccaatcatccc |
| | | tcaagtcacgcgtcaccatctcaaaggacaactctaagaatcaggtgtcactgaaa |
| | | ctgtcatctgtgaccgcagccgacaccgccgtgtactattgcgctaagcattacta |
| | | ttatggcgggagctacgcaatggattactggggacagggtactctggtcaccgtgt |
| | | ccagcaccactaccccagcaccgaggccacccaccccggctcctaccatcgcctcc |
| | | cagcctctgtccctgcgtccggaggcatgtagacccgcagctggtggggccgtgca |
| | | tacccggggtcttgacttcgcctgcgatatctacatttgggcccctctggctggta |
| | | cttgcggggtcctgctgctttcactcgtgatcactctttactgtaagcgcggtcgg |
| | | aagaagctgctgtacatctttaagcaacccttcatgaggcctgtgcagactactca |
| | | agaggaggacggctgttcatgccggttcccagaggaggaggaaggcggctgcgaac |
| | | tgcgcgtgaaattcagccgcagcgcagatgctccagcctacaagcaggggcagaac |
| | | cagctctacaacgaactcaatcttggtcggagagaggagtacgacgtgctggacaa |
| | | gcggagaggacgggacccagaaatgggcgggaagccgcgcagaaagaatccccaag |
| | | agggcctgtacaacgagctccaaaaggataagatggcagaagcctatagcgagatt |
| | | ggtatgaaaggggaacgcagaagaggcaaaggccacgacggactgtaccagggact |
| | | cagcaccgccaccaaggacacctatgacgctcttcacatgcaggccctgccgcctc |
| | | gg |
| 104876 | 902 | MALPVTALLLPLALLLHAARPeivmtqspatlslspgeratlscrasqdiskylnw |
| CAR 2-Full- | | yqqkpgqaprlliyhtsrlhsgiparfsgsgsgtdytltisslqpedfavyfcqqg |
| aa | | ntlpytfgqgtkleikggggsggggsggggsqvqlqesgpglvkpsetlsltctvs |
| | | gvslpdygvswirqppgkglewigviwgsettyyqsslksrvtiskdnsknqvslk |
| | | lssvtaadtavyycakhyyyggsyamdywgqgtlvtvsstttpaprpptpaptias |
| | | qplslrpeacrpaaggavhtrgldfacdiyiwaplagtcgvlllslvitlyckrgr |
| | | kkllyifkqpfmrpvqttqeedgcscrfpeeeeggcelrvkfsrsadapaykqgqn |
| | | qlynelnlgrreeydvldkrrgrdpemggkprrknpqeglynelqkdkmaeaysei |
| | | gmkgerrrgkghdglyqglstatkdtydalhmqalppr |

CAR 3

| | | |
|---|---|---|
| CAR 3 scFv | 903 | qvqlqesgpglvkpsetlsltctvsgvslpdygvswirqppgkglewigviwgset |
| domain | | tyyssslksrvtiskdnsknqvslklssvtaadtavyycakhyyyggsyamdywgq |
| | | gtlvtvssggggsggggsggggseivmtqspatlslspgeratlscrasqdiskyl |
| | | nwyqqkpgqaprlliyhtsrlhsgiparfsgsgsgtdytltisslqpedfavyfcq |
| | | qgntlpytfgqgtkleik |
| 103104 | 904 | atggctctgcccgtgaccgcactcctcctgccactggctctgctgcttcacgccgc |
| CAR 3- | | tcgcccacaagtccagcttcaagaatcagggcctggtctggtgaagccatctgaga |
| Soluble scFv- | | ctctgtccctcacttgcaccgtgagcggagtgtccctcccagactacggagtgagc |
| nt | | tggattagacagcctcccggaaagggactggagtggatcggagtgatttggggtag |
| | | cgaaaccacttactattcatcttccctgaagtcacgggtcaccatttcaaaggata |
| | | actcaaagaatcaagtgagcctcaagctctcatcagtcaccgccgctgacaccgcc |
| | | gtgtattactgtgccaagcattactactatggagggtcctacgccatggactactg |
| | | gggccagggaactctggtcactgtgtcatctggtggaggaggtagcggaggaggcg |
| | | ggagcggtggaggtggctccgaaatcgtgatgacccagagccctgcaaccctgtcc |
| | | ctttctcccggggaacgggctaccctttcttgtcgggcatcacaagatatctcaaa |
| | | atacctcaattggtatcaacagaagccgggacaggcccctaggcttcttatctacc |
| | | acacctctcgcctgcatagcgggattcccgcacgctttagcgggtctggaagcggg |
| | | accgactacactctgaccatctcatctctccagcccgaggacttcgccgtctactt |
| | | ctgccagcagggtaacaccctgccgtacaccttcggccagggcaccaagcttgaga |
| | | tcaaacatcaccaccatcatcaccatcac |
| 103104 | 905 | MALPVTALLLPLALLLHAARPqvqlqesgpglvkpsetlsltctvsgvslpdygvs |
| CAR 3- | | wirqppgkglewigviwgsettyyssslksrvtiskdnsknqvslklssvtaadta |
| Soluble scFv- | | vyycakhyyyggsyamdywgqgtlvtvssggggsggggsggggseivmtqspatls |
| aa | | lspgeratlscrasqdiskylnwyqqkpgqaprlliyhtsrlhsgiparfsgsgsg |
| | | tdytltisslqpedfavyfcqqgntlpytfgqgtkleikhhhhhhhh |
| 104877 | 906 | atggctctgcccgtgaccgcactcctcctgccactggctctgctgcttcacgccgc |
| CAR 3-Full- | | tcgcccacaagtccagcttcaagaatcagggcctggtctggtgaagccatctgaga |
| nt | | ctctgtccctcacttgcaccgtgagcggagtgtccctcccagactacggagtgagc |
| | | tggattagacagcctcccggaaagggactggagtggatcggagtgatttggggtag |
| | | cgaaaccacttactattcatcttccctgaagtcacgggtcaccatttcaaaggata |
| | | actcaaagaatcaagtgagcctcaagctctcatcagtcaccgccgctgacaccgcc |
| | | gtgtattactgtgccaagcattactactatggagggtcctacgccatggactactg |
| | | gggccagggaactctggtcactgtgtcatctggtggaggaggtagcggaggaggcg |
| | | ggagcggtggaggtggctccgaaatcgtgatgacccagagccctgcaaccctgtcc |
| | | ctttctcccggggaacgggctaccctttcttgtcgggcatcacaagatatctcaaa |
| | | atacctcaattggtatcaacagaagccgggacaggcccctaggcttcttatctacc |
| | | acacctctcgcctgcatagcgggattcccgcacgctttagcgggtctggaagcggg |
| | | accgactacactctgaccatctcatctctccagcccgaggacttcgccgtctactt |
| | | ctgccagcagggtaacaccctgccgtacaccttcggccagggcaccaagcttgaga |
| | | tcaaaaccactactcccgctccaaggccacccacccctgccccgaccatcgcctct |
| | | cagccgctttccctgcgtccggaggcatgtagacccgcagctggtggggccgtgca |
| | | tacccggggtcttgacttcgcctgcgatatctacatttgggcccctctggctggta |
| | | cttgcggggtcctgctgctttcactcgtgatcactctttactgtaagcgcggtcgg |
| | | aagaagctgctgtacatctttaagcaacccttcatgaggcctgtgcagactactca |
| | | agaggaggacggctgttcatgccggttcccagaggaggaggaaggcggctgcgaac |
| | | tgcgcgtgaaattcagccgcagcgcagatgctccagcctacaagcaggggcagaac |
| | | cagctctacaacgaactcaatcttggtcggagagaggagtacgacgtgctggacaa |
| | | gcggagaggacgggacccagaaatgggcgggaagccgcgcagaaagaatccccaag |
| | | agggcctgtacaacgagctccaaaaggataagatggcagaagcctatagcgagatt |
| | | ggtatgaaaggggaacgcagaagaggcaaaggccacgacggactgtaccagggact |
| | | cagcaccgccaccaaggacacctatgacgctcttcacatgcaggccctgccgcctc |
| | | gg |
| 104877 | 907 | MALPVTALLLPLALLLHAARPqvqlqesgpglvkpsetlsltctvsgvslpdygvs |
| CAR 3-Full- | | wirqppgkglewigviwgsettyyssslksrvtiskdnsknqvslklssvtaadta |
| aa | | vyycakhyyyggsyamdywgqgtlvtvssggggsggggsggggseivmtqspatls |
| | | lspgeratlscrasqdiskylnwyqqkpgqaprlliyhtsrlhsgiparfsgsgsg |
| | | tdytltisslqpedfavyfcqqgntlpytfgqgtkleiktttpaprpptpaptias |
| | | qplslrpeacrpaaggavhtrgldfacdiyiwaplagtcgvlllslvitlyckrgr |
| | | kkllyifkqpfmrpvqttqeedgcscrfpeeeeggcelrvkfsrsadapaykqgqn |
| | | qlynelnlgrreeydvldkrrgrdpemggkprrknpqeglynelqkdkmaeaysei |
| | | gmkgerrrgkghdglyqglstatkdtydalhmqalppr |

CAR 4

| | | |
|---|---|---|
| CAR 4 scFv | 908 | qvqlqesgpglvkpsetlsltctvsgvslpdygvswirqppgkglewigviwgset |
| domain | | tyyqsslksrvtiskdnsknqvslklssvtaadtavyycakhyyyggsyamdywgq |
| | | gtlvtvssggggsggggsggggseivmtqspatlslspgeratlscrasqdiskyl |
| | | nwyqqkpgqaprlliyhtsrlhsgiparfsgsgsgtdytltisslqpedfavyfcq |
| | | qgntlpytfgqgtkleik |
| 103106 | 909 | atggctctgcccgtgaccgcactcctcctgccactggctctgctgcttcacgccgc |
| CAR 4- | | tcgcccacaagtccagcttcaagaatcagggcctggtctggtgaagccatctgaga |
| Soluble scFv- | | ctctgtccctcacttgcaccgtgagcggagtgtccctcccagactacggagtgagc |
| nt | | tggattagacagcctcccggaaagggactggagtggatcggagtgatttggggtag |
| | | cgaaaccacttactatcaatcttccctgaagtcacgggtcaccatttcaaaggata |
| | | actcaaagaatcaagtgagcctcaagctctcatcagtcaccgccgctgacaccgcc |
| | | gtgtattactgtgccaagcattactactatggagggtcctacgccatggactactg |
| | | gggccagggaactctggtcactgtgtcatctggtggaggaggtagcggaggaggcg |
| | | ggagcggtggaggtggctccgaaatcgtgatgacccagagccctgcaaccctgtcc |
| | | ctttctcccggggaacgggctaccctttcttgtcgggcatcacaagatatctcaaa |
| | | atacctcaattggtatcaacagaagccgggacaggcccctaggcttcttatctacc |
| | | acacctctcgcctgcatagcgggattcccgcacgctttagcgggtctggaagcggg |
| | | accgactacactctgaccatctcatctctccagcccgaggacttcgccgtctactt |
| | | ctgccagcagggtaacaccctgccgtacaccttcggccagggcaccaagcttgaga |
| | | tcaaacatcaccaccatcatcaccatcac |
| 103106 | 910 | MALPVTALLLPLALLLHAARPqvqlqesgpglvkpsetlsltctvsgvslpdygvs |
| CAR 4- | | wirqppgkglewigviwgsettyyqsslksrvtiskdnsknqvslklssvtaadta |
| Soluble scFv- | | vyycakhyyyggsyamdywgqgtlvtvssggggsggggsggggseivmtqspatls |
| aa | | lspgeratlscrasqdiskylnwyqqkpgqaprlliyhtsrlhsgiparfsgsgsg |
| | | tdytltisslqpedfavyfcqqgntlpytfgqgtkleikhhhhhhhh |
| 104878 | 911 | atggctctgcccgtgaccgcactcctcctgccactggctctgctgcttcacgccgc |
| CAR 4-Full- | | tcgcccacaagtccagcttcaagaatcagggcctggtctggtgaagccatctgaga |
| nt | | ctctgtccctcacttgcaccgtgagcggagtgtccctcccagactacggagtgagc |
| | | tggattagacagcctcccggaaagggactggagtggatcggagtgatttggggtag |
| | | cgaaaccacttactatcaatcttccctgaagtcacgggtcaccatttcaaaggata |
| | | actcaaagaatcaagtgagcctcaagctctcatcagtcaccgccgctgacaccgcc |
| | | gtgtattactgtgccaagcattactactatggagggtcctacgccatggactactg |
| | | gggccagggaactctggtcactgtgtcatctggtggaggaggtagcggaggaggcg |
| | | ggagcggtggaggtggctccgaaatcgtgatgacccagagccctgcaaccctgtcc |
| | | ctttctcccggggaacgggctaccctttcttgtcgggcatcacaagatatctcaaa |
| | | atacctcaattggtatcaacagaagccgggacaggcccctaggcttcttatctacc |
| | | acacctctcgcctgcatagcgggattcccgcacgctttagcgggtctggaagcggg |
| | | accgactacactctgaccatctcatctctccagcccgaggacttcgccgtctactt |
| | | ctgccagcagggtaacaccctgccgtacaccttcggccagggcaccaagcttgaga |
| | | tcaaaaccactactcccgctccaaggccacccacccctgccccgaccatcgcctct |
| | | cagccgctttccctgcgtccggaggcatgtagacccgcagctggtggggccgtgca |
| | | tacccggggtcttgacttcgcctgcgatatctacatttgggcccctctggctggta |
| | | cttgcggggtcctgctgctttcactcgtgatcactctttactgtaagcgcggtcgg |
| | | aagaagctgctgtacatctttaagcaacccttcatgaggcctgtgcagactactca |
| | | agaggaggacggctgttcatgccggttcccagaggaggaggaaggcggctgcgaac |
| | | tgcgcgtgaaattcagccgcagcgcagatgctccagcctacaagcaggggcagaac |
| | | cagctctacaacgaactcaatcttggtcggagagaggagtacgacgtgctggacaa |
| | | gcggagaggacgggacccagaaatgggcgggaagccgcgcagaaagaatccccaag |
| | | agggcctgtacaacgagctccaaaaggataagatggcagaagcctatagcgagatt |
| | | ggtatgaaaggggaacgcagaagaggcaaaggccacgacggactgtaccagggact |
| | | cagcaccgccaccaaggacacctatgacgctcttcacatgcaggccctgccgcctc |
| | | gg |
| 104878 | 912 | MALPVTALLLPLALLLHAARPqvqlqesgpglvkpsetlsltctvsgvslpdygvs |
| CAR 4-Full- | | wirqppgkglewigviwgsettyygsslksrvtiskdnsknqvslklssvtaadta |
| aa | | vyycakhyyyggsyamdywgqgtlvtvssggggsggggsggggseivmtqspatls |
| | | lspgeratlscrasqdiskylnwyqqkpgqaprlliyhtsrlhsgiparfsgsgsg |
| | | tdytltisslqpedfavyfcqqgntlpytfgqgtkleiktttpaprpptpaptias |
| | | qplslrpeacrpaaggavhtrgldfacdiyiwaplagtcgvlllslvitlyckrgr |
| | | kkllyifkqpfmrpvqttqeedgcscrfpeeeeggcelrvkfsrsadapaykqgqn |
| | | qlynelnlgrreeydvldkrrgrdpemggkprrknpqeglynelqkdkmaeaysei |
| | | gmkgerrrgkghdglyqglstatkdtydalhmqalppr |

CAR 5

| | | |
|---|---|---|
| CAR 5 scFv | 913 | eivmtqspatlslspgeratlscrasqdiskylnwyqqkpgqaprlliyhtsrlhs |
| domain | | giparfsgsgsgtdytltisslqpedfavyfcqqgntlpytfgqgtkleikggggs |
| | | ggggsggggsggggsqvqlqesgpglvkpsetlsltctvsgvslpdygvswirqpp |
| | | gkglewigviwgsettyyssslksrvtiskdnsknqvslklssvtaadtavyycak |
| | | hyyyggsyamdywgqgtlvtvss |
| 99789 | 914 | atggccctcccagtgaccgctctgctgctgcctctcgcacttcttctccatgccgc |
| CAR 5- | | tcggcctgagatcgtcatgacccaaagccccgctaccctgtccctgtcacccggcg |
| Soluble scFv- | | agagggcaaccctttcatgcagggccagccaggacatttctaagtacctcaactgg |
| nt | | tatcagcagaagccagggcaggctcctcgcctgctgatctaccacaccagccgcct |
| | | ccacagcggtatccccgccagattttccgggagcgggtctggaaccgactacaccc |
| | | tcaccatctcttctctgcagcccgaggatttcgccgtctatttctgccagcagggg |
| | | aatactctgccgtacaccttcggtcaaggtaccaagctggaaatcaagggaggcgg |
| | | aggatcaggcggtggcggaagcggaggaggtggctccggaggaggaggttcccaag |
| | | tgcagcttcaagaatcaggacccggacttgtgaagccatcagaaaccctctccctg |
| | | acttgtaccgtgtccggtgtgagcctccccgactacggagtctcttggattcgcca |
| | | gcctccggggaagggtcttgaatggattggggtgatttggggatcagagactactt |
| | | actactcttcatcacttaagtcacgggtcaccatcagcaaagataatagcaagaac |
| | | caagtgtcacttaagctgtcatctgtgaccgccgctgacaccgccgtgtactattg |
| | | tgccaaacattactattacggagggtcttatgctatggactactggggacagggga |
| | | ccctggtgactgtctctagccatcaccatcaccaccatcatcac |
| 99789 | 915 | MALPVTALLLPLALLLHAARPeivmtqspatlslspgeratlscrasqdiskylnw |
| CAR 5- | | yqqkpgqaprlliyhtsrlhsgiparfsgsgsgtdytltisslqpedfavyfcqqg |
| Soluble scFv- | | ntlpytfgqgtkleikggggsggggsggggsggggsqvqlqesgpglvkpsetlsl |
| aa | | tctvsgvslpdygvswirqppgkglewigviwgsettyyssslksrvtiskdnskn |
| | | qvslklssvtaadtavyycakhyyyggsyamdywgqgtlvtvsshhhhhhhh |
| 104879 | 916 | atggccctccctgtcaccgccctgctgcttccgctggctcttctgctccacgccgc |
| CAR 5-Full- | | tcggcccgaaattgtgatgacccagtcacccgccactcttagcctttcacccggtg |
| nt | | agcgcgcaaccctgtcttgcagagcctcccaagacatctcaaaataccttaattgg |
| | | tatcaacagaagcccggacaggctcctcgccttctgatctaccacaccagccggct |
| | | ccattctggaatccctgccaggttcagcggtagcggatctgggaccgactacaccc |
| | | tcactatcagctcactgcagccagaggacttcgctgtctatttctgtcagcaaggg |
| | | aacaccctgccctacacctttggacagggcaccaagctcgagattaaaggtggagg |
| | | tggcagcggaggaggtgggtccggcggtggaggaagcggcggaggcgggagccagg |
| | | tccaactccaagaaagcggaccgggtcttgtgaagccatcagaaactctttcactg |
| | | acttgtactgtgagcggagtgtctctccccgattacggggtgtcttggatcagaca |
| | | gccaccggggaagggtctggaatggattggagtgatttggggctctgagactactt |
| | | actactcttcatccctcaagtcacgcgtcaccatctcaaaggacaactctaagaat |
| | | caggtgtcactgaaactgtcatctgtgaccgcagccgacaccgccgtgtactattg |
| | | cgctaagcattactattatggcgggagctacgcaatggattactggggacagggta |
| | | ctctggtcaccgtgtccagcaccactaccccagcaccgaggccacccaccccggct |
| | | cctaccatcgcctcccagcctctgtccctgcgtccggaggcatgtagacccgcagc |
| | | tggtggggccgtgcatacccggggtcttgacttcgcctgcgatatctacatttggg |
| | | cccctctggctggtacttgcggggtcctgctgctttcactcgtgatcactctttac |
| | | tgtaagcgcggtcggaagaagctgctgtacatctttaagcaacccttcatgaggcc |
| | | tgtgcagactactcaagaggaggacggctgttcatgccggttcccagaggaggagg |
| | | aaggcggctgcgaactgcgcgtgaaattcagccgcagcgcagatgctccagcctac |
| | | aagcaggggcagaaccagctctacaacgaactcaatcttggtcggagagaggagta |
| | | cgacgtgctggacaagcggagaggacgggacccagaaatgggcgggaagccgcgca |
| | | gaaagaatccccaagagggcctgtacaacgagctccaaaaggataagatggcagaa |
| | | gcctatagcgagattggtatgaaaggggaacgcagaagaggcaaaggccacgacgg |
| | | actgtaccagggactcagcaccgccaccaaggacacctatgacgctcttcacatgc |
| | | aggccctgccgcctcgg |
| 104879 | 917 | MALPVTALLLPLALLLHAARPeivmtqspatlslspgeratlscrasqdiskylnw |
| CAR 5-Full- | | yqqkpgqaprlliyhtsrlhsgiparfsgsgsgtdytltisslqpedfavyfcqqg |
| aa | | ntlpytfgqgtkleikggggsggggsggggsggggsqvqlqesgpglvkpsetlsl |
| | | tctvsgvslpdygvswirqppgkglewigviwgsettyyssslksrvtiskdnskn |
| | | qvslklssvtaadtavyycakhyyyggsyamdywgqgtlvtvsstttpaprpptpa |
| | | ptiasqplslrpeacrpaaggavhtrgldfacdiyiwaplagtcgvlllslvitly |
| | | ckrgrkkllyifkqpfmrpvqttgeedgcscrfpeeeeggcelrvkfsrsadapay |
| | | kqgqnqlynelnlgrreeydvldkrrgrdpemggkprrknpqeglynelqkdkmae |
| | | ayseigmkgerrrgkghdglygglstatkdtydalhmqalppr |

CAR 6

| | | |
|---|---|---|
| CAR 6 | 918 | eivmtqspatlslspgeratlscrasqdiskylnwyqqkpgqaprlliyhtsrlhs |
| scFv domain | | giparfsgsgsgtdytltisslqpedfavyfcqqgntlpytfgqgtkleikggggs |
| | | ggggsggggsggggsqvqlqesgpglvkpsetlsltctvsgvslpdygvswirqpp |
| | | gkglewigviwgsettyyqsslksrvtiskdnsknqvslklssvtaadtavyycak |
| | | hyyyggsyamdywgqgtlvtvss |
| 99790 | 919 | atggccctcccagtgaccgctctgctgctgcctctcgcacttcttctccatgccgc |
| CAR 6- | | tcggcctgagatcgtcatgacccaaagccccgctaccctgtccctgtcacccggcg |
| Soluble scFv- | | agagggcaaccctttcatgcagggccagccaggacatttctaagtacctcaactgg |
| nt | | tatcagcagaagccagggcaggctcctcgcctgctgatctaccacaccagccgcct |
| | | ccacagcggtatccccgccagattttccgggagcgggtctggaaccgactacaccc |
| | | tcaccatctcttctctgcagcccgaggatttcgccgtctatttctgccagcagggg |
| | | aatactctgccgtacaccttcggtcaaggtaccaagctggaaatcaagggaggcgg |
| | | aggatcaggcggtggcggaagcggaggaggtggctccggaggaggaggttcccaag |
| | | tgcagcttcaagaatcaggacccggacttgtgaagccatcagaaaccctctccctg |
| | | acttgtaccgtgtccggtgtgagcctccccgactacggagtctcttggattcgcca |
| | | gcctccggggaagggtcttgaatggattggggtgatttggggatcagagactactt |
| | | actaccagtcatcacttaagtcacgggtcaccatcagcaaagataatagcaagaac |
| | | caagtgtcacttaagctgtcatctgtgaccgccgctgacaccgccgtgtactattg |
| | | tgccaaacattactattacggagggtcttatgctatggactactggggacagggga |
| | | ccctggtgactgtctctagccatcaccatcaccaccatcatcac |
| 99790 | 920 | MALPVTALLLPLALLLHAARPeivmtqspatlslspgeratlscrasqdiskylnw |
| CAR 6- | | yqqkpgqaprlliyhtsrlhsgiparfsgsgsgtdytltisslqpedfavyfcqqg |
| Soluble scFv- | | ntlpytfgqgtkleikggggsggggsggggsggggsqvqlqesgpglvkpsetlsl |
| aa | | tctvsgvslpdygvswirqppgkglewigviwgsettyyqsslksrvtiskdnskn |
| | | qvslklssvtaadtavyycakhyyyggsyamdywgqgtlvtvsshhhhhhhh |
| 104880 | 921 | atggccctccctgtcaccgccctgctgcttccgctggctcttctgctccacgccgc |
| CAR 6- | | tcggcccgaaattgtgatgacccagtcacccgccactcttagcctttcacccggtg |
| Full-nt | | agcgcgcaaccctgtcttgcagagcctcccaagacatctcaaaataccttaattgg |
| | | tatcaacagaagcccggacaggctcctcgccttctgatctaccacaccagccggct |
| | | ccattctggaatccctgccaggttcagcggtagcggatctgggaccgactacaccc |
| | | tcactatcagctcactgcagccagaggacttcgctgtctatttctgtcagcaaggg |
| | | aacaccctgccctacacctttggacagggcaccaagctcgagattaaaggtggagg |
| | | tggcagcggaggaggtgggtccggcggtggaggaagcggaggcggagggagccagg |
| | | tccaactccaagaaagcggaccgggtcttgtgaagccatcagaaactctttcactg |
| | | acttgtactgtgagcggagtgtctctccccgattacggggtgtcttggatcagaca |
| | | gccaccggggaagggtctggaatggattggagtgatttggggctctgagactactt |
| | | actaccaatcatccctcaagtcacgcgtcaccatctcaaaggacaactctaagaat |
| | | caggtgtcactgaaactgtcatctgtgaccgcagccgacaccgccgtgtactattg |
| | | cgctaagcattactattatggcgggagctacgcaatggattactggggacagggta |
| | | ctctggtcaccgtgtccagcaccactaccccagcaccgaggccacccaccccggct |
| | | cctaccatcgcctcccagcctctgtccctgcgtccggaggcatgtagacccgcagc |
| | | tggtggggccgtgcatacccggggtcttgacttcgcctgcgatatctacatttggg |
| | | cccctctggctggtacttgcggggtcctgctgctttcactcgtgatcactctttac |
| | | tgtaagcgcggtcggaagaagctgctgtacatctttaagcaacccttcatgaggcc |
| | | tgtgcagactactcaagaggaggacggctgttcatgccggttcccagaggaggagg |
| | | aaggcggctgcgaactgcgcgtgaaattcagccgcagcgcagatgctccagcctac |
| | | aagcaggggcagaaccagctctacaacgaactcaatcttggtcggagagaggagta |
| | | cgacgtgctggacaagcggagaggacgggacccagaaatgggcgggaagccgcgca |
| | | gaaagaatccccaagagggcctgtacaacgagctccaaaaggataagatggcagaa |
| | | gcctatagcgagattggtatgaaaggggaacgcagaagaggcaaaggccacgacgg |
| | | actgtaccagggactcagcaccgccaccaaggacacctatgacgctcttcacatgc |
| | | aggccctgccgcctcgg |
| 104880 | 922 | MALPVTALLLPLALLLHAARPeivmtqspatlslspgeratlscrasqdiskylnw |
| CAR 6- | | yqqkpgqaprlliyhtsrlhsgiparfsgsgsgtdytltisslqpedfavyfcqqg |
| Full-aa | | ntlpytfgqgtkleikggggsggggsggggsggggsqvqlqesgpglvkpsetlsl |
| | | tctvsgvslpdygvswirqppgkglewigviwgsettyyqsslksrvtiskdnskn |
| | | qvslklssvtaadtavyycakhyyyggsyamdywgqgtlvtvsstttpaprpptpa |
| | | ptiasqplslrpeacrpaaggavhtrgldfacdiyiwaplagtcgvlllslvitly |
| | | ckrgrkkllyifkqpfmrpvqttgeedgcscrfpeeeeggcelrvkfsrsadapay |
| | | kqgqnqlynelnlgrreeydvldkrrgrdpemggkprrknpqeglynelqkdkmae |
| | | ayseigmkgerrrgkghdglyqglstatkdtydalhmqalppr |

CAR 7

| | | |
|---|---|---|
| CAR 7 scFv | 923 | qvqlqesgpglvkpsetlsltctvsgvslpdygvswirqppgkglewigviwgset |
| domain | | tyyssslksrvtiskdnsknqvslklssvtaadtavyycakhyyyggsyamdywgq |
| | | gtlvtvssggggsggggsggggsggggseivmtqspatlslspgeratlscrasqd |
| | | iskylnwyqqkpgqaprlliyhtsrlhsgiparfsgsgsgtdytltisslqpedfa |
| | | vyfcqqgntlpytfgqgtkleik |
| 100796 | 924 | atggcactgcctgtcactgccctcctgctgcctctggccctccttctgcatgccgc |
| CAR 7- | | caggccccaagtccagctgcaagagtcaggacccggactggtgaagccgtctgaga |
| Soluble scFv- | | ctctctcactgacttgtaccgtcagcggcgtgtccctccccgactacggagtgtca |
| nt | | tggatccgccaacctcccgggaaagggcttgaatggattggtgtcatctggggttc |
| | | tgaaaccacctactactcatcttccctgaagtccagggtgaccatcagcaaggata |
| | | attccaagaaccaggtcagccttaagctgtcatctgtgaccgctgctgacaccgcc |
| | | gtgtattactgcgccaagcactactattacggaggaagctacgctatggactattg |
| | | gggacagggcactctcgtgactgtgagcagcggcggtggagggtctggaggtggag |
| | | gatccggtggtggtgggtcaggcggaggagggagcgagattgtgatgactcagtca |
| | | ccagccaccctttctctttcacccggcgagagagcaaccctgagctgtagagccag |
| | | ccaggacatttctaagtacctcaactggtatcagcaaaaaccggggcaggcccctc |
| | | gcctcctgatctaccatacctcacgccttcactctggtatccccgctcggtttagc |
| | | ggatcaggatctggtaccgactacactctgaccatttccagcctgcagccagaaga |
| | | tttcgcagtgtatttctgccagcagggcaatacccttccttacaccttcggtcagg |
| | | gaaccaagctcgaaatcaagcaccatcaccatcatcaccaccat |
| 100796 | 925 | MALPVTALLLPLALLLHAARPqvqlqesgpglvkpsetlsltctvsgvslpdygvs |
| CAR 7- | | wirqppgkglewigviwgsettyyssslksrvtiskdnsknqvslklssvtaadta |
| Soluble scFv- | | vyycakhyyyggsyamdywgqgtlvtvssggggsggggsggggsggggseivmtqs |
| aa | | patlslspgeratlscrasqdiskylnwyqqkpgqaprlliyhtsrlhsgiparfs |
| | | gsgsgtdytltisslqpedfavyfcqqgntlpytfgqgtkleikhhhhhhhh |
| 104881 | 926 | atggctctgcccgtgaccgcactcctcctgccactggctctgctgcttcacgccgc |
| CAR 7 | | tcgcccacaagtccagcttcaagaatcagggcctggtctggtgaagccatctgaga |
| Full-nt | | ctctgtccctcacttgcaccgtgagcggagtgtccctcccagactacggagtgagc |
| | | tggattagacagcctcccggaaagggactggagtggatcggagtgatttggggtag |
| | | cgaaaccacttactattcatcttccctgaagtcacgggtcaccatttcaaaggata |
| | | actcaaagaatcaagtgagcctcaagctctcatcagtcaccgccgctgacaccgcc |
| | | gtgtattactgtgccaagcattactactatggagggtcctacgccatggactactg |
| | | gggccagggaactctggtcactgtgtcatctggtggaggaggtagcggaggaggcg |
| | | ggagcggtggaggtggctccggaggtggcggaagcgaaatcgtgatgacccagagc |
| | | cctgcaaccctgtccctttctcccggggaacgggctaccctttcttgtcgggcatc |
| | | acaagatatctcaaaatacctcaattggtatcaacagaagccgggacaggccccta |
| | | ggcttcttatctaccacacctctcgcctgcatagcgggattcccgcacgctttagc |
| | | gggtctggaagcgggaccgactacactctgaccatctcatctctccagcccgagga |
| | | cttcgccgtctacttctgccagcagggtaacaccctgccgtacaccttcggccagg |
| | | gcaccaagcttgagatcaaaaccactactcccgctccaaggccacccacccctgcc |
| | | ccgaccatcgcctctcagccgctttccctgcgtccggaggcatgtagacccgcagc |
| | | tggtggggccgtgcatacccggggtcttgacttcgcctgcgatatctacatttggg |
| | | cccctctggctggtacttgcggggtcctgctgctttcactcgtgatcactctttac |
| | | tgtaagcgcggtcggaagaagctgctgtacatctttaagcaacccttcatgaggcc |
| | | tgtgcagactactcaagaggaggacggctgttcatgccggttcccagaggaggagg |
| | | aaggcggctgcgaactgcgcgtgaaattcagccgcagcgcagatgctccagcctac |
| | | aagcaggggcagaaccagctctacaacgaactcaatcttggtcggagagaggagta |
| | | cgacgtgctggacaagcggagaggacgggacccagaaatgggcgggaagccgcgca |
| | | gaaagaatccccaagagggcctgtacaacgagctccaaaaggataagatggcagaa |
| | | gcctatagcgagattggtatgaaaggggaacgcagaagaggcaaaggccacgacgg |
| | | actgtaccagggactcagcaccgccaccaaggacacctatgacgctcttcacatgc |
| | | aggccctgccgcctcgg |
| 104881 | 927 | MALPVTALLLPLALLLHAARPqvqlqesgpglvkpsetlsltctvsgvslpdygvs |
| CAR 7 | | wirqppgkglewigviwgsettyyssslksrvtiskdnsknqvslklssvtaadta |
| Full-aa | | vyycakhyyyggsyamdywgqgtlvtvssggggsggggsggggsggggseivmtqs |
| | | patlslspgeratlscrasqdiskylnwyqqkpgqaprlliyhtsrlhsgiparfs |
| | | gsgsgtdytltisslqpedfavyfcqqgntlpytfgqgtkleiktttpaprpptpa |
| | | ptiasqplslrpeacrpaaggavhtrgldfacdiyiwaplagtcgvlllslvitly |
| | | ckrgrkkllyifkqpfmrpvqttgeedgcscrfpeeeeggcelrvkfsrsadapay |
| | | kqgqnqlynelnlgrreeydvldkrrgrdpemggkprrknpqeglynelqkdkmae |
| | | ayseigmkgerrrgkghdglyqglstatkdtydalhmqalppr |

CAR 8

| | | |
|---|---|---|
| CAR 8 scFv | 928 | qvqlqesgpglvkpsetlsltctvsgvslpdygvswirqppgkglewigviwgset |
| domain | | tyyqsslksrvtiskdnsknqvslklssvtaadtavyycakhyyyggsyamdywgq |
| | | gtlvtvssggggsggggsggggsggggseivmtqspatlslspgeratlscrasqd |
| | | iskylnwyqqkpgqaprlliyhtsrlhsgiparfsgsgsgtdytltisslqpedfa |
| | | vyfcqqgntlpytfgqgtkleik |
| 100798 | 929 | atggcactgcctgtcactgccctcctgctgcctctggccctccttctgcatgccgc |
| CAR 8- | | caggccccaagtccagctgcaagagtcaggacccggactggtgaagccgtctgaga |
| Soluble scFv- | | ctctctcactgacttgtaccgtcagcggcgtgtccctccccgactacggagtgtca |
| nt | | tggatccgccaacctcccgggaaagggcttgaatggattggtgtcatctggggttc |
| | | tgaaaccacctactaccagtcttccctgaagtccagggtgaccatcagcaaggata |
| | | attccaagaaccaggtcagccttaagctgtcatctgtgaccgctgctgacaccgcc |
| | | gtgtattactgcgccaagcactactattacggaggaagctacgctatggactattg |
| | | gggacagggcactctcgtgactgtgagcagcggcggtggagggtctggaggtggag |
| | | gatccggtggtggtgggtcaggcggaggagggagcgagattgtgatgactcagtca |
| | | ccagccaccctttctctttcacccggcgagagagcaaccctgagctgtagagccag |
| | | ccaggacatttctaagtacctcaactggtatcagcaaaaaccggggcaggcccctc |
| | | gcctcctgatctaccatacctcacgccttcactctggtatccccgctcggtttagc |
| | | ggatcaggatctggtaccgactacactctgaccatttccagcctgcagccagaaga |
| | | tttcgcagtgtatttctgccagcagggcaatacccttccttacaccttcggtcagg |
| | | gaaccaagctcgaaatcaagcaccatcaccatcatcatcaccac |
| 100798 | 930 | MALPVTALLLPLALLLHAARPqvqlqesgpglvkpsetlsltctvsgvslpdygvs |
| CAR 8- | | wirqppgkglewigviwgsettyyqsslksrvtiskdnsknqvslklssvtaadta |
| Soluble scFv- | | vyycakhyyyggsyamdywgqgtlvtvssggggsggggsggggsggggseivmtqs |
| aa | | patlslspgeratlscrasqdiskylnwyqqkpgqaprlliyhtsrlhsgiparfs |
| | | gsgsgtdytltisslqpedfavyfcqqgntlpytfgqgtkleikhhhhhhhh |
| 104882 CAR | 931 | atggctctgcccgtgaccgcactcctcctgccactggctctgctgcttcacgccgc |
| 8-Full-nt | | tcgcccacaagtccagcttcaagaatcagggcctggtctggtgaagccatctgaga |
| | | ctctgtccctcacttgcaccgtgagcggagtgtccctcccagactacggagtgagc |
| | | tggattagacagcctcccggaaagggactggagtggatcggagtgatttggggtag |
| | | cgaaaccacttactatcaatcttccctgaagtcacgggtcaccatttcaaaggata |
| | | actcaaagaatcaagtgagcctcaagctctcatcagtcaccgccgctgacaccgcc |
| | | gtgtattactgtgccaagcattactactatggagggtcctacgccatggactactg |
| | | gggccagggaactctggtcactgtgtcatctggtggaggaggtagcggaggaggcg |
| | | ggagcggtggaggtggctccggaggcggtgggtcagaaatcgtgatgacccagagc |
| | | cctgcaaccctgtccctttctcccggggaacgggctaccctttcttgtcgggcatc |
| | | acaagatatctcaaaatacctcaattggtatcaacagaagccgggacaggccccta |
| | | ggcttcttatctaccacacctctcgcctgcatagcgggattcccgcacgctttagc |
| | | gggtctggaagcgggaccgactacactctgaccatctcatctctccagcccgagga |
| | | cttcgccgtctacttctgccagcagggtaacaccctgccgtacaccttcggccagg |
| | | gcaccaagcttgagatcaaaaccactactcccgctccaaggccacccacccctgcc |
| | | ccgaccatcgcctctcagccgctttccctgcgtccggaggcatgtagacccgcagc |
| | | tggtggggccgtgcatacccggggtcttgacttcgcctgcgatatctacatttggg |
| | | cccctctggctggtacttgcggggtcctgctgctttcactcgtgatcactctttac |
| | | tgtaagcgcggtcggaagaagctgctgtacatctttaagcaacccttcatgaggcc |
| | | tgtgcagactactcaagaggaggacggctgttcatgccggttcccagaggaggagg |
| | | aaggcggctgcgaactgcgcgtgaaattcagccgcagcgcagatgctccagcctac |
| | | aagcaggggcagaaccagctctacaacgaactcaatcttggtcggagagaggagta |
| | | cgacgtgctggacaagcggagaggacgggacccagaaatgggcgggaagccgcgca |
| | | gaaagaatccccaagagggcctgtacaacgagctccaaaaggataagatggcagaa |
| | | gcctatagcgagattggtatgaaaggggaacgcagaagaggcaaaggccacgacgg |
| | | actgtaccagggactcagcaccgccaccaaggacacctatgacgctcttcacatgc |
| | | aggccctgccgcctcgg |
| 104882 | 932 | MALPVTALLLPLALLLHAARPqvqlqesgpglvkpsetlsltctvsgvslpdygvs |
| CAR 8-Full- | | wirqppgkglewigviwgsettyyqsslksrvtiskdnsknqvslklssvtaadta |
| aa | | vyycakhyyyggsyamdywgqgtlvtvssggggsggggsggggsggggseivmtqs |
| | | patlslspgeratlscrasqdiskylnwyqqkpgqaprlliyhtsrlhsgiparfs |
| | | gsgsgtdytltisslqpedfavyfcqqgntlpytfgqgtkleiktttpaprpptpa |
| | | ptiasqplslrpeacrpaaggavhtrgldfacdiyiwaplagtcgvlllslvitly |
| | | ckrgrkkllyifkqpfmrpvqttgeedgcscrfpeeeeggcelrvkfsrsadapay |
| | | kqgqnqlynelnlgrreeydvldkrrgrdpemggkprrknpqeglynelqkdkmae |
| | | ayseigmkgerrrgkghdglyqglstatkdtydalhmqalppr |

CAR 9

| | | |
|---|---|---|
| CAR 9 scFv | 933 | eivmtqspatlslspgeratlscrasqdiskylnwyqqkpgqaprlliyhtsrlhs |
| domain | | giparfsgsgsgtdytltisslqpedfavyfcqqgntlpytfgqgtkleikggggs |
| | | ggggsggggsggggsqvqlqesgpglvkpsetlsltctvsgvslpdygvswirqpp |
| | | gkglewigviwgsettyynsslksrvtiskdnsknqvslklssvtaadtavyycak |
| | | hyyyggsyamdywgqgtlvtvss |
| 99789 | 934 | atggccctcccagtgaccgctctgctgctgcctctcgcacttcttctccatgccgc |
| CAR 9- | | tcggcctgagatcgtcatgacccaaagccccgctaccctgtccctgtcacccggcg |
| Soluble scFv- | | agagggcaaccctttcatgcagggccagccaggacatttctaagtacctcaactgg |
| nt | | tatcagcagaagccagggcaggctcctcgcctgctgatctaccacaccagccgcct |
| | | ccacagcggtatccccgccagattttccgggagcgggtctggaaccgactacaccc |
| | | tcaccatctcttctctgcagcccgaggatttcgccgtctatttctgccagcagggg |
| | | aatactctgccgtacaccttcggtcaaggtaccaagctggaaatcaagggaggcgg |
| | | aggatcaggcggtggcggaagcggaggaggtggctccggaggaggaggttcccaag |
| | | tgcagcttcaagaatcaggacccggacttgtgaagccatcagaaaccctctccctg |
| | | acttgtaccgtgtccggtgtgagcctccccgactacggagtctcttggattcgcca |
| | | gcctccggggaagggtcttgaatggattggggtgatttggggatcagagactactt |
| | | actacaattcatcacttaagtcacgggtcaccatcagcaaagataatagcaagaac |
| | | caagtgtcacttaagctgtcatctgtgaccgccgctgacaccgccgtgtactattg |
| | | tgccaaacattactattacggagggtcttatgctatggactactggggacagggga |
| | | ccctggtgactgtctctagccatcaccatcaccaccatcatcac |
| 99789 | 935 | MALPVTALLLPLALLLHAARPeivmtqspatlslspgeratlscrasqdiskylnw |
| CAR 9- | | yqqkpgqaprlliyhtsrlhsgiparfsgsgsgtdytltisslqpedfavyfcqqg |
| Soluble scFv- | | ntlpytfgqgtkleikggggsggggsggggsggggsqvqlqesgpglvkpsetlsl |
| aa | | tctvsgvslpdygvswirqppgkglewigviwgsettyynsslksrvtiskdnskn |
| | | qvslklssvtaadtavyycakhyyyggsyamdywgqgtlvtvsshhhhhhhh |
| 105974 | 936 | atggccctccctgtcaccgccctgctgcttccgctggctcttctgctccacgccgc |
| CAR 9-Full- | | tcggcccgaaattgtgatgacccagtcacccgccactcttagcctttcacccggtg |
| nt | | agcgcgcaaccctgtcttgcagagcctcccaagacatctcaaaataccttaattgg |
| | | tatcaacagaagcccggacaggctcctcgccttctgatctaccacaccagccggct |
| | | ccattctggaatccctgccaggttcagcggtagcggatctgggaccgactacaccc |
| | | tcactatcagctcactgcagccagaggacttcgctgtctatttctgtcagcaaggg |
| | | aacaccctgccctacacctttggacagggcaccaagctcgagattaaaggtggagg |
| | | tggcagcggaggaggtgggtccggcggtggaggaagcggaggcggtgggagccagg |
| | | tccaactccaagaaagcggaccgggtcttgtgaagccatcagaaactctttcactg |
| | | acttgtactgtgagcggagtgtctctccccgattacggggtgtcttggatcagaca |
| | | gccaccggggaagggtctggaatggattggagtgatttggggctctgagactactt |
| | | actacaactcatccctcaagtcacgcgtcaccatctcaaaggacaactctaagaat |
| | | caggtgtcactgaaactgtcatctgtgaccgcagccgacaccgccgtgtactattg |
| | | cgctaagcattactattatggcgggagctacgcaatggattactggggacagggta |
| | | ctctggtcaccgtgtccagcaccactaccccagcaccgaggccacccaccccggct |
| | | cctaccatcgcctcccagcctctgtccctgcgtccggaggcatgtagacccgcagc |
| | | tggtggggccgtgcatacccggggtcttgacttcgcctgcgatatctacatttggg |
| | | cccctctggctggtacttgcggggtcctgctgctttcactcgtgatcactctttac |
| | | tgtaagcgcggtcggaagaagctgctgtacatctttaagcaacccttcatgaggcc |
| | | tgtgcagactactcaagaggaggacggctgttcatgccggttcccagaggaggagg |
| | | aaggcggctgcgaactgcgcgtgaaattcagccgcagcgcagatgctccagcctac |
| | | aagcaggggcagaaccagctctacaacgaactcaatcttggtcggagagaggagta |
| | | cgacgtgctggacaagcggagaggacgggacccagaaatgggcgggaagccgcgca |
| | | gaaagaatccccaagagggcctgtacaacgagctccaaaaggataagatggcagaa |
| | | gcctatagcgagattggtatgaaaggggaacgcagaagaggcaaaggccacgacgg |
| | | actgtaccagggactcagcaccgccaccaaggacacctatgacgctcttcacatgc |
| | | aggccctgccgcctcgg |
| 105974 | 937 | MALPVTALLLPLALLLHAARPeivmtqspatlslspgeratlscrasqdiskylnw |
| CAR 9-Full- | | yqqkpgqaprlliyhtsrlhsgiparfsgsgsgtdytltisslqpedfavyfcqqg |
| aa | | ntlpytfgqgtkleikggggsggggsggggsggggsqvqlqesgpglvkpsetlsl |
| | | tctvsgvslpdygvswirqppgkglewigviwgsettyynsslksrvtiskdnskn |
| | | qvslklssvtaadtavyycakhyyyggsyamdywgqgtlvtvsstttpaprpptpa |
| | | ptiasqplslrpeacrpaaggavhtrgldfacdiyiwaplagtcgvlllslvitly |
| | | ckrgrkkllyifkqpfmrpvqttgeedgcscrfpeeeeggcelrvkfsrsadapay |
| | | kqgqnqlynelnlgrreeydvldkrrgrdpemggkprrknpqeglynelqkdkmae |
| | | ayseigmkgerrrgkghdglyqglstatkdtydalhmqalppr |

CAR 10

| | | |
|---|---|---|
| CAR 10 scFv | 938 | qvqlqesgpglvkpsetlsltctvsgvslpdygvswirqppgkglewigviwgset |
| domain | | tyynsslksrvtiskdnsknqvslklssvtaadtavyycakhyyyggsyamdywgq |
| | | gtlvtvssggggsggggsggggsggggseivmtqspatlslspgeratlscrasqd |
| | | iskylnwyqqkpgqaprlliyhtsrlhsgiparfsgsgsgtdytltisslqpedfa |
| | | vyfcqqgntlpytfgqgtkleik |
| 100796 | 939 | atggcactgcctgtcactgccctcctgctgcctctggccctccttctgcatgccgc |
| CAR 10- | | caggccccaagtccagctgcaagagtcaggacccggactggtgaagccgtctgaga |
| Soluble scFv- | | ctctctcactgacttgtaccgtcagcggcgtgtccctccccgactacggagtgtca |
| nt | | tggatccgccaacctcccgggaaagggcttgaatggattggtgtcatctggggttc |
| | | tgaaaccacctactacaactcttccctgaagtccagggtgaccatcagcaaggata |
| | | attccaagaaccaggtcagccttaagctgtcatctgtgaccgctgctgacaccgcc |
| | | gtgtattactgcgccaagcactactattacggaggaagctacgctatggactattg |
| | | gggacagggcactctcgtgactgtgagcagcggcggtggagggtctggaggtggag |
| | | gatccggtggtggtgggtcaggcggaggagggagcgagattgtgatgactcagtca |
| | | ccagccaccctttctctttcacccggcgagagagcaaccctgagctgtagagccag |
| | | ccaggacatttctaagtacctcaactggtatcagcaaaaaccggggcaggcccctc |
| | | gcctcctgatctaccatacctcacgccttcactctggtatccccgctcggtttagc |
| | | ggatcaggatctggtaccgactacactctgaccatttccagcctgcagccagaaga |
| | | tttcgcagtgtatttctgccagcagggcaatacccttccttacaccttcggtcagg |
| | | gaaccaagctcgaaatcaagcaccatcaccatcatcaccaccat |
| 100796 | 940 | MALPVTALLLPLALLLHAARPqvqlqesgpglvkpsetlsltctvsgvslpdygvs |
| CAR 10- | | wirqppgkglewigviwgsettyynsslksrvtiskdnsknqvslklssvtaadta |
| Soluble scFv- | | vyycakhyyyggsyamdywgqgtlvtvssggggsggggsggggsggggseivmtqs |
| aa | | patlslspgeratlscrasqdiskylnwyqqkpgqaprlliyhtsrlhsgiparfs |
| | | gsgsgtdytltisslqpedfavyfcqqgntlpytfgqgtkleikhhhhhhhh |
| 105975 CAR | 941 | atggccctccctgtcaccgccctgctgcttccgctggctcttctgctccacgccgc |
| 10 Full-nt | | tcggcccgaaattgtgatgacccagtcacccgccactcttagcctttcacccggtg |
| | | agcgcgcaaccctgtcttgcagagcctcccaagacatctcaaaataccttaattgg |
| | | tatcaacagaagcccggacaggctcctcgccttctgatctaccacaccagccggct |
| | | ccattctggaatccctgccaggttcagcggtagcggatctgggaccgactacaccc |
| | | tcactatcagctcactgcagccagaggacttcgctgtctatttctgtcagcaaggg |
| | | aacaccctgccctacacctttggacagggcaccaagctcgagattaaaggtggagg |
| | | tggcagcggaggaggtgggtccggcggtggaggaagcggaggcggtgggagccagg |
| | | tccaactccaagaaagcggaccgggtcttgtgaagccatcagaaactctttcactg |
| | | acttgtactgtgagcggagtgtctctccccgattacggggtgtcttggatcagaca |
| | | gccaccggggaagggtctggaatggattggagtgatttggggctctgagactactt |
| | | actacaactcatccctcaagtcacgcgtcaccatctcaaaggacaactctaagaat |
| | | caggtgtcactgaaactgtcatctgtgaccgcagccgacaccgccgtgtactattg |
| | | cgctaagcattactattatggcgggagctacgcaatggattactggggacagggta |
| | | ctctggtcaccgtgtccagcaccactaccccagcaccgaggccacccaccccggct |
| | | cctaccatcgcctcccagcctctgtccctgcgtccggaggcatgtagacccgcagc |
| | | tggtggggccgtgcatacccggggtcttgacttcgcctgcgatatctacatttggg |
| | | cccctctggctggtacttgcggggtcctgctgctttcactcgtgatcactctttac |
| | | tgtaagcgcggtcggaagaagctgctgtacatctttaagcaacccttcatgaggcc |
| | | tgtgcagactactcaagaggaggacggctgttcatgccggttcccagaggaggagg |
| | | aaggcggctgcgaactgcgcgtgaaattcagccgcagcgcagatgctccagcctac |
| | | aagcaggggcagaaccagctctacaacgaactcaatcttggtcggagagaggagta |
| | | cgacgtgctggacaagcggagaggacgggacccagaaatgggcgggaagccgcgca |
| | | gaaagaatccccaagagggcctgtacaacgagctccaaaaggataagatggcagaa |
| | | gcctatagcgagattggtatgaaaggggaacgcagaagaggcaaaggccacgacgg |
| | | actgtaccagggactcagcaccgccaccaaggacacctatgacgctcttcacatgc |
| | | aggccctgccgcctcgg |
| 105975 | 942 | MALPVTALLLPLALLLHAARPEIVMTQSPATLSLSPGERATLSCRASQDISKYLNW |
| CAR 10 Full- | | YQQKPGQAPRLLIYHTSRLHSGIPARFSGSGSGTDYTLTISSLQPEDFAVYFCQQG |
| aa | | NTLPYTFGQGTKLEIKGGGGSGGGGSGGGGSGGGGSQVQLQESGPGLVKPSETLSL |
| | | TCTVSGVSLPDYGVSWIRQPPGKGLEWIGVIWGSETTYYNSSLKSRVTISKDNSKN |
| | | QVSLKLSSVTAADTAVYYCAKHYYYGGSYAMDYWGQGTLVTVSSTTTPAPRPPTPA |
| | | PTIASQPLSLRPEACRPAAGGAVHTRGLDFACDIYIWAPLAGTCGVLLLSLVITLY |
| | | CKRGRKKLLYIFKQPFMRPVQTTQEEDGCSCRFPEEEEGGCELRVKFSRSADAPAY |
| | | KQGQNQLYNELNLGRREEYDVLDKRRGRDPEMGGKPRRKNPQEGLYNELQKDKMAE |
| | | AYSEIGMKGERRRGKGHDGLYQGLSTATKDTYDALHMQALPPR |

CAR 11

| | | |
|---|---|---|
| CAR 11 scFv | 943 | eivmtqspatlslspgeratlscrasqdiskylnwyqqkpgqaprlliyhtsrlhs |
| domain | | giparfsgsgsgtdytltisslqpedfavyfcqqgntlpytfgqgtkleikggggs |
| | | ggggsggggsqvqlqesgpglvkpsetlsltctvsgvslpdygvswirqppgkgle |
| | | wigviwgsettyynsslksrvtiskdnsknqvslklssvtaadtavyycakhyyyg |
| | | gsyamdywgqgtlvtvss |
| 103101 | 944 | Atggccctccctgtcaccgccctgctgcttccgctggctcttctgctccacgccgc |
| CAR 11- | | tcggcccgaaattgtgatgacccagtcacccgccactcttagcctttcacccggtg |
| Soluble scFv- | | agcgcgcaaccctgtcttgcagagcctcccaagacatctcaaaataccttaattgg |
| nt | | tatcaacagaagcccggacaggctcctcgccttctgatctaccacaccagccggct |
| | | ccattctggaatccctgccaggttcagcggtagcggatctgggaccgactacaccc |
| | | tcactatcagctcactgcagccagaggacttcgctgtctatttctgtcagcaaggg |
| | | aacaccctgccctacacctttggacagggcaccaagctcgagattaaaggtggagg |
| | | tggcagcggaggaggtgggtccggcggtggaggaagccaggtccaactccaagaaa |
| | | gcggaccgggtcttgtgaagccatcagaaactctttcactgacttgtactgtgagc |
| | | ggagtgtctctccccgattacggggtgtcttggatcagacagccaccggggaaggg |
| | | tctggaatggattggagtgatttggggctctgagactacttactacaattcatccc |
| | | tcaagtcacgcgtcaccatctcaaaggacaactctaagaatcaggtgtcactgaaa |
| | | ctgtcatctgtgaccgcagccgacaccgccgtgtactattgcgctaagcattacta |
| | | ttatggcgggagctacgcaatggattactggggacagggtactctggtcaccgtgt |
| | | ccagccaccaccatcatcaccatcaccat |
| 103101 | 945 | MALPVTALLLPLALLLHAARPeivmtqspatlslspgeratlscrasqdiskylnw |
| CAR 11- | | yqqkpgqaprlliyhtsrlhsgiparfsgsgsgtdytltisslqpedfavyfcqqg |
| Soluble scFv- | | ntlpytfgqgtkleikggggsggggsggggsqvqlqesgpglvkpsetlsltctvs |
| aa | | gvslpdygvswirqppgkglewigviwgsettyynsslksrvtiskdnsknqvslk |
| | | lssvtaadtavyycakhyyyggsyamdywgqgtlvtvsshhhhhhhh |
| 105976 CAR | 946 | atggctctgcccgtgaccgcactcctcctgccactggctctgctgcttcacgccgc |
| 11 Full-nt | | tcgcccacaagtccagcttcaagaatcagggcctggtctggtgaagccatctgaga |
| | | ctctgtccctcacttgcaccgtgagcggagtgtccctcccagactacggagtgagc |
| | | tggattagacagcctcccggaaagggactggagtggatcggagtgatttggggtag |
| | | cgaaaccacttactataactcttccctgaagtcacgggtcaccatttcaaaggata |
| | | actcaaagaatcaagtgagcctcaagctctcatcagtcaccgccgctgacaccgcc |
| | | gtgtattactgtgccaagcattactactatggagggtcctacgccatggactactg |
| | | gggccagggaactctggtcactgtgtcatctggtggaggaggtagcggaggaggcg |
| | | ggagcggtggaggtggctccggaggtggcggaagcgaaatcgtgatgacccagagc |
| | | cctgcaaccctgtccctttctcccggggaacgggctaccctttcttgtcgggcatc |
| | | acaagatatctcaaaatacctcaattggtatcaacagaagccgggacaggccccta |
| | | ggcttcttatctaccacacctctcgcctgcatagcgggattcccgcacgctttagc |
| | | gggtctggaagcgggaccgactacactctgaccatctcatctctccagcccgagga |
| | | cttcgccgtctacttctgccagcagggtaacaccctgccgtacaccttcggccagg |
| | | gcaccaagcttgagatcaaaaccactactcccgctccaaggccacccacccctgcc |
| | | ccgaccatcgcctctcagccgctttccctgcgtccggaggcatgtagacccgcagc |
| | | tggtggggccgtgcatacccggggtcttgacttcgcctgcgatatctacatttggg |
| | | cccctctggctggtacttgcggggtcctgctgctttcactcgtgatcactctttac |
| | | tgtaagcgcggtcggaagaagctgctgtacatctttaagcaacccttcatgaggcc |
| | | tgtgcagactactcaagaggaggacggctgttcatgccggttcccagaggaggagg |
| | | aaggcggctgcgaactgcgcgtgaaattcagccgcagcgcagatgctccagcctac |
| | | aagcaggggcagaaccagctctacaacgaactcaatcttggtcggagagaggagta |
| | | cgacgtgctggacaagcggagaggacgggacccagaaatgggcgggaagccgcgca |
| | | gaaagaatccccaagagggcctgtacaacgagctccaaaaggataagatggcagaa |
| | | gcctatagcgagattggtatgaaaggggaacgcagaagaggcaaaggccacgacgg |
| | | actgtaccagggactcagcaccgccaccaaggacacctatgacgctcttcacatgc |
| | | aggccctgccgcctcgg |
| 105976 | 947 | MALPVTALLLPLALLLHAARPQVQLQESGPGLVKPSETLSLTCTVSGVSLPDYGVS |
| CAR 11 Full- | | WIRQPPGKGLEWIGVIWGSETTYYNSSLKSRVTISKDNSKNQVSLKLSSVTAADTA |
| aa | | VYYCAKHYYYGGSYAMDYWGQGTLVTVSSGGGGSGGGGSGGGGSGGGGSEIVMTQS |
| | | PATLSLSPGERATLSCRASQDISKYLNWYQQKPGQAPRLLIYHTSRLHSGIPARFS |
| | | GSGSGTDYTLTISSLQPEDFAVYFCQQGNTLPYTFGQGTKLEIKTTTPAPRPPTPA |
| | | PTIASQPLSLRPEACRPAAGGAVHTRGLDFACDIYIWAPLAGTCGVLLLSLVITLY |
| | | CKRGRKKLLYIFKQPFMRPVQTTQEEDGCSCRFPEEEEGGCELRVKFSRSADAPAY |
| | | KQGQNQLYNELNLGRREEYDVLDKRRGRDPEMGGKPRRKNPQEGLYNELQKDKMAE |
| | | AYSEIGMKGERRRGKGHDGLYQGLSTATKDTYDALHMQALPPR |

CAR 12

| | | |
|---|---|---|
| CAR 12 | 948 | qvqlqesgpglvkpsetlsltctvsgvslpdygvswirqppgkglewigviwgset |
| scFv domain | | tyynsslksrvtiskdnsknqvslklssvtaadtavyycakhyyyggsyamdywgq |
| | | gtlvtvssggggsggggsggggseivmtqspatlslspgeratlscrasqdiskyl |
| | | nwyqqkpgqaprlliyhtsrlhsgiparfsgsgsgtdytltisslqpedfavyfcq |
| | | qgntlpytfgqgtkleik |
| 103104 | 949 | atggctctgcccgtgaccgcactcctcctgccactggctctgctgcttcacgccgc |
| CAR 12- | | tcgcccacaagtccagcttcaagaatcagggcctggtctggtgaagccatctgaga |
| Soluble scFv- | | ctctgtccctcacttgcaccgtgagcggagtgtccctcccagactacggagtgagc |
| nt | | tggattagacagcctcccggaaagggactggagtggatcggagtgatttggggtag |
| | | cgaaaccacttactataactcttccctgaagtcacgggtcaccatttcaaaggata |
| | | actcaaagaatcaagtgagcctcaagctctcatcagtcaccgccgctgacaccgcc |
| | | gtgtattactgtgccaagcattactactatggagggtcctacgccatggactactg |
| | | gggccagggaactctggtcactgtgtcatctggtggaggaggtagcggaggaggcg |
| | | ggagcggtggaggtggctccgaaatcgtgatgacccagagccctgcaaccctgtcc |
| | | ctttctcccggggaacgggctaccctttcttgtcgggcatcacaagatatctcaaa |
| | | atacctcaattggtatcaacagaagccgggacaggcccctaggcttcttatctacc |
| | | acacctctcgcctgcatagcgggattcccgcacgctttagcgggtctggaagcggg |
| | | accgactacactctgaccatctcatctctccagcccgaggacttcgccgtctactt |
| | | ctgccagcagggtaacaccctgccgtacaccttcggccagggcaccaagcttgaga |
| | | tcaaacatcaccaccatcatcaccatcac |
| 103104 | 950 | MALPVTALLLPLALLLHAARPqvqlqesgpglvkpsetlsltctvsgvslpdygvs |
| CAR 12- | | wirqppgkglewigviwgsettyynsslksrvtiskdnsknqvslklssvtaadta |
| Soluble scFv- | | vyycakhyyyggsyamdywgqgtlvtvssggggsggggsggggseivmtqspatls |
| aa | | lspgeratlscrasqdiskylnwyqqkpgqaprlliyhtsrlhsgiparfsgsgsg |
| | | tdytltisslqpedfavyfcqqgntlpytfgqgtkleikhhhhhhhh |
| 105977 | 951 | atggccctccctgtcaccgccctgctgcttccgctggctcttctgctccacgccgc |
| CAR 12- | | tcggcccgaaattgtgatgacccagtcacccgccactcttagcctttcacccggtg |
| Full-nt | | agcgcgcaaccctgtcttgcagagcctcccaagacatctcaaaataccttaattgg |
| | | tatcaacagaagcccggacaggctcctcgccttctgatctaccacaccagccggct |
| | | ccattctggaatccctgccaggttcagcggtagcggatctgggaccgactacaccc |
| | | tcactatcagctcactgcagccagaggacttcgctgtctatttctgtcagcaaggg |
| | | aacaccctgccctacacctttggacagggcaccaagctcgagattaaaggtggagg |
| | | tggcagcggaggaggtgggtccggcggtggaggaagccaggtccaactccaagaaa |
| | | gcggaccgggtcttgtgaagccatcagaaactctttcactgacttgtactgtgagc |
| | | ggagtgtctctccccgattacggggtgtcttggatcagacagccaccggggaaggg |
| | | tctggaatggattggagtgatttggggctctgagactacttactacaactcatccc |
| | | tcaagtcacgcgtcaccatctcaaaggacaactctaagaatcaggtgtcactgaaa |
| | | ctgtcatctgtgaccgcagccgacaccgccgtgtactattgcgctaagcattacta |
| | | ttatggcgggagctacgcaatggattactggggacagggtactctggtcaccgtgt |
| | | ccagcaccactaccccagcaccgaggccacccaccccggctcctaccatcgcctcc |
| | | cagcctctgtccctgcgtccggaggcatgtagacccgcagctggtggggccgtgca |
| | | tacccggggtcttgacttcgcctgcgatatctacatttgggcccctctggctggta |
| | | cttgcggggtcctgctgctttcactcgtgatcactctttactgtaagcgcggtcgg |
| | | aagaagctgctgtacatctttaagcaacccttcatgaggcctgtgcagactactca |
| | | agaggaggacggctgttcatgccggttcccagaggaggaggaaggcggctgcgaac |
| | | tgcgcgtgaaattcagccgcagcgcagatgctccagcctacaagcaggggcagaac |
| | | cagctctacaacgaactcaatcttggtcggagagaggagtacgacgtgctggacaa |
| | | gcggagaggacgggacccagaaatgggcgggaagccgcgcagaaagaatccccaag |
| | | agggcctgtacaacgagctccaaaaggataagatggcagaagcctatagcgagatt |
| | | ggtatgaaaggggaacgcagaagaggcaaaggccacgacggactgtaccagggact |
| | | cagcaccgccaccaaggacacctatgacgctcttcacatgcaggccctgccgcctc |
| | | gg |
| 105977 | 952 | MALPVTALLLPLALLLHAARPEIVMTQSPATLSLSPGERATLSCRASQDISKYLNW |
| CAR 12- | | YQQKPGQAPRLLIYHTSRLHSGIPARFSGSGSGTDYTLTISSLQPEDFAVYFCQQG |
| Full-aa | | NTLPYTFGQGTKLEIKGGGGSGGGGSGGGGSQVQLQESGPGLVKPSETLSLTCTVS |
| | | GVSLPDYGVSWIRQPPGKGLEWIGVIWGSETTYYNSSLKSRVTISKDNSKNQVSLK |
| | | LSSVTAADTAVYYCAKHYYYGGSYAMDYWGQGTLVTVSSTTTPAPRPPTPAPTIAS |
| | | QPLSLRPEACRPAAGGAVHTRGLDFACDIYIWAPLAGTCGVLLLSLVITLYCKRGR |
| | | KKLLYIFKQPFMRPVQTTQEEDGCSCRFPEEEEGGCELRVKFSRSADAPAYKQGQN |
| | | QLYNELNLGRREEYDVLDKRRGRDPEMGGKPRRKNPQEGLYNELQKDKMAEAYSEI |
| | | GMKGERRRGKGHDGLYQGLSTATKDTYDALHMQALPPR |

CTL019

| | | |
|---|---|---|
| CTL019- | 953 | atggccctgcccgtcaccgctctgctgctgccccttgctctgcttcttcatgcagc |
| Soluble | | aaggccggacatccagatgacccaaaccacctcatccctctctgcctctcttggag |
| scFv-Histag- | | acagggtgaccatttcttgtcgcgccagccaggacatcagcaagtatctgaactgg |
| nt | | tatcagcagaagccggacggaaccgtgaagctcctgatctaccatacctctcgcct |
| | | gcatagcggcgtgccctcacgcttctctggaagcggatcaggaaccgattattctc |
| | | tcactatttcaaatcttgagcaggaagatattgccacctatttctgccagcagggt |
| | | aataccctgccctacaccttcggaggagggaccaagctcgaaatcaccggtggagg |
| | | aggcagcggcggtggagggtctggtggaggtggttctgaggtgaagctgcaagaat |
| | | caggccctggacttgtggccccttcacagtccctgagcgtgacttgcaccgtgtcc |
| | | ggagtctccctgcccgactacggagtgtcatggatcagacaacctccacggaaagg |
| | | actggaatggctcggtgtcatctggggtagcgaaactacttactacaattcagccc |
| | | tcaaaagcaggctgactattatcaaggacaacagcaagtcccaagtctttcttaag |
| | | atgaactcactccagactgacgacaccgcaatctactattgtgctaagcactacta |
| | | ctacggaggatcctacgctatggattactggggacaaggtacttccgtcactgtct |
| | | cttcacaccatcatcaccatcaccatcac |
| CTL019- | 954 | MALPVTALLLPLALLLHAARPdiqmtqttsslsaslgdrvtiscrasqdiskylnw |
| Soluble | | yqqkpdgtvklliyhtsrlhsgvpsrfsgsgsgtdysltisnleqediatyfcqqg |
| scFv-Histag- | | ntlpytfgggtkleitggggsggggsggggsevklqesgpglvapsqslsvtctvs |
| aa | | gvslpdygvswirqpprkglewlgviwgsettyynsalksrltiikdnsksqvflk |
| | | mnslqtddtaiyycakhyyyggsyamdywgqgtsvtvsshhhhhhhh |
| CTL019 Full- | 955 | atggccttaccagtgaccgccttgctcctgccgctggccttgctgctccacgccgc |
| nt | | caggccggacatccagatgacacagactacatcctccctgtctgcctctctgggag |
| | | acagagtcaccatcagttgcagggcaagtcaggacattagtaaatatttaaattgg |
| | | tatcagcagaaaccagatggaactgttaaactcctgatctaccatacatcaagatt |
| | | acactcaggagtcccatcaaggttcagtggcagtgggtctggaacagattattctc |
| | | tcaccattagcaacctggagcaagaagatattgccacttacttttgccaacagggt |
| | | aatacgcttccgtacacgttcggaggggggaccaagctggagatcacaggtggcgg |
| | | tggctcgggcggtggtgggtcgggtggcggcggatctgaggtgaaactgcaggagt |
| | | caggacctggcctggtggcgccctcacagagcctgtccgtcacatgcactgtctca |
| | | ggggtctcattacccgactatggtgtaagctggattcgccagcctccacgaaaggg |
| | | tctggagtggctgggagtaatatggggtagtgaaaccacatactataattcagctc |
| | | tcaaatccagactgaccatcatcaaggacaactccaagagccaagttttcttaaaa |
| | | atgaacagtctgcaaactgatgacacagccatttactactgtgccaaacattatta |
| | | ctacggtggtagctatgctatggactactggggccaaggaacctcagtcaccgtct |
| | | cctcaaccacgacgccagcgccgcgaccaccaacaccggcgcccaccatcgcgtcg |
| | | cagcccctgtccctgcgcccagaggcgtgccggccagcggcggggggcgcagtgca |
| | | cacgagggggctggacttcgcctgtgatatctacatctgggcgcccttggccggga |
| | | cttgtggggtccttctcctgtcactggttatcaccctttactgcaaacggggcaga |
| | | aagaaactcctgtatatattcaaacaaccatttatgagaccagtacaaactactca |
| | | agaggaagatggctgtagctgccgatttccagaagaagaagaaggaggatgtgaac |
| | | tgagagtgaagttcagcaggagcgcagacgcccccgcgtacaagcagggccagaac |
| | | cagctctataacgagctcaatctaggacgaagagaggagtacgatgttttggacaa |
| | | gagacgtggccgggaccctgagatggggggaaagccgagaaggaagaaccctcagg |
| | | aaggcctgtacaatgaactgcagaaagataagatggcggaggcctacagtgagatt |
| | | gggatgaaaggcgagcgccggaggggcaaggggcacgatggcctttaccagggtct |
| | | cagtacagccaccaaggacacctacgacgcccttcacatgcaggccctgccccctc |
| | | gc |
| CTL019 Full- | 956 | MALPVTALLLPLALLLHAARPdiqmtqttsslsaslgdrvtiscrasqdiskylnw |
| aa | | yqqkpdgtvklliyhtsrlhsgvpsrfsgsgsgtdysltisnleqediatyfcqqg |
| | | ntlpytfgggtkleitggggsggggsggggsevklqesgpglvapsqslsvtctvs |
| | | gvslpdygvswirqpprkglewlgviwgsettyynsalksrltiikdnsksqvflk |
| | | mnslqtddtaiyycakhyyyggsyamdywgqgtsvtvsstttpaprpptpaptias |
| | | qplslrpeacrpaaggavhtrgldfacdiyiwaplagtcgvlllslvitlyckrgr |
| | | kkllyifkqpfmrpvqttgeedgcscrfpeeeeggcelrvkfsrsadapaykqgqn |
| | | qlynelnlgrreeydvldkrrgrdpemggkprrknpqeglynelqkdkmaeaysei |
| | | gmkgerrrgkghdglyqglstatkdtydalhmqalppr |
| CTL019 scFv | 957 | diqmtqttsslsaslgdrvtiscrasqdiskylnwyqqkpdgtvklliyhtsrlhs |
| domain | | gvpsrfsgsgsgtdysltisnleqediatyfcqqgntlpytfgggtkleitggggs |
| | | ggggsggggsevklqesgpglvapsqslsvtctvsgvslpdygvswirqpprkgle |
| | | wlgviwgsettyynsalksrltiikdnsksqvflkmnslqtddtaiyycakhyyyg |
| | | gsyamdywgqgtsvtvss |

[0904] In some embodiments, the CD19 CAR or binding domain includes the amino acid sequence of CTL019, or is encoded by the nucleotide sequence of CTL019 according to Table 9 with or without the leader sequence or the his tag, or a sequence substantially identical thereto (e.g., at least 85%, 90%, 95% or higher identity).

[0905] In some embodiments, the CDRs are defined according to the Kabat numbering scheme, the Chothia numbering scheme, or a combination thereof.

[0906] The sequences of humanized CDR sequences of the scFv domains are shown in Table 10A for the heavy chain variable domains and in Table 10B for the light chain variable domains. “ID” stands for the respective SEQ ID NO for each CDR.

TABLE 10A
Heavy Chain Variable Domain CDRs (according to Kabat)

| | | | SEQ | | SEQ | | SEQ |
|---|---|---|---|---|---|---|---|
| Candidate | FW | HCDR1 | ID | HCDR2 | ID | HCDR3 | ID |
| murine_CART19 | | DYGVS | 958 | VIWGSETTYYNSALKS | 959 | HYYYGGSYAMDY | 960 |
| humanized_CART19 a | VH4 | DYGVS | 958 | VIWGSETTYY [symbol] S [symbol] LKS | 961 | HYYYGGSYAMDY | 960 |
| humanized_CART19 b | VH4 | DYGVS | 958 | VIWGSETTYY [symbol] S [symbol] LKS | 962 | HYYYGGSYAMDY | 960 |
| humanized_CART19 c | VH4 | DYGVS | 958 | VIWGSETTYYNS [symbol] LKS | 963 | HYYYGGSYAMDY | 960 |

TABLE 10B
Light Chain Variable Domain CDRs (according to Kabat)

| | | | SEQ | | SEQ | | SEQ |
|---|---|---|---|---|---|---|---|
| Candidate | FW | LCDR1 | ID | LCDR2 | ID | LCDR3 | ID |
| murine_CART19 | | RASQDISKYLN | 964 | HTSRLHS | 965 | QQGNTLPYT | 966 |
| humanized_CART19 a | VK3 | RASQDISKYLN | 964 | HTSRLHS | 965 | QQGNTLPYT | 966 |
| humanized_CART19 b | VK3 | RASQDISKYLN | 964 | HTSRLHS | 965 | QQGNTLPYT | 966 |
| humanized_CART19 c | VK3 | RASQDISKYLN | 964 | HTSRLHS | 965 | QQGNTLPYT | 966 |

[0907] In one embodiment, the CAR molecule comprises a BCMA CAR molecule described herein, e.g., a BCMA CAR described in US-2016-0046724-A1 or WO2016/014565. In embodiments, the BCMA CAR comprises an amino acid, or has a nucleotide sequence of a CAR molecule, or an antigen binding domain according to US-2016-0046724-A1, or Table 1 or 16, SEQ ID NO: 271 or SEQ ID NO: 273 of WO2016/014565, incorporated herein by reference, or a sequence substantially identical to any of the aforesaid sequences (e.g., at least 85%, 90%, 95% or more identical to any of the aforesaid BCMA CAR sequences). The amino acid and nucleotide sequences encoding the BCMA CAR molecules and antigen binding domains (e.g., including one, two, three VH CDRs; and one, two, three VL CDRs according to Kabat or Chothia), are specified in WO2016/014565.

[0908] In embodiments, the BCMA CAR comprises an anti-BCMA binding domain (e.g., human or humanized anti-BCMA binding domain), a transmembrane domain, and an intracellular signaling domain, and wherein said anti-BCMA binding domain comprises a heavy chain complementary determining region 1 (HC CDR1), a heavy chain complementary determining region 2 (HC CDR2), and a heavy chain complementary determining region 3 (HC CDR3) of any anti-BMCA heavy chain binding domain amino acid sequences listed in Table 11A or 11B, or a sequence at least 85%, 90%, 95% or more identical thereto (e.g., having less than 5, 4, 3, 2 or 1 amino acid substitutions, e.g., conservative substitutions).

[0909] In one embodiment, the anti-BCMA binding domain comprises a light chain variable region described herein (e.g., in Table 11A or 11B) and/or a heavy chain variable region described herein (e.g., in Table 11A or 11B), or a sequence at least 85%, 90%, 95% or more identical thereto.

[0910] In one embodiment, the encoded anti-BCMA binding domain is a scFv comprising a light chain and a heavy chain of an amino acid sequence of Table 11A or 11B.

[0911] In an embodiment, the human or humanized anti-BCMA binding domain (e.g., an scFv) comprises: a light chain variable region comprising an amino acid sequence having at least one, two or three modifications (e.g., substitutions, e.g., conservative substitutions) but not more than 30, 20 or 10 modifications (e.g., substitutions, e.g., conservative substitutions) of an amino acid sequence of a light chain variable region provided in Table 11A or 11B, or a sequence at least 85%, 90%, 95% or more identical thereto; and/or a heavy chain variable region comprising an amino acid sequence having at least one, two or three modifications (e.g., substitutions, e.g., conservative substitutions) but not more than 30, 20 or 10 modifications (e.g., substitutions, e.g., conservative substitutions) of an amino acid sequence of a heavy chain variable region provided in Table 11A or 11B, or a sequence at least 85%, 90%, 95% or more identical thereto.

TABLE 11A
Amino Acid and Nucleic Acid Sequences of exemplary
anti-BCMA scFv domains and BCMA CAR molecules

| | | |
|---|---|---|
| | SEQ | |
| Name/ | ID | |
| Description | NO: | Sequence |

139109

| | | |
|---|---|---|
| 139109-aa | 967 | EVQLVESGGGLVQPGGSLRLSCAVSGFALSNHGMSWVRRAPGKGLEWV |
| ScFv domain | | SGIVYSGSTYYAASVKGRFTISRDNSRNTLYLQMNSLRPEDTAIYYCS |
| | | AHGGESDVWGQGTTVTVSSASGGGGSGGRASGGGGSDIQLTQSPSSLS |
| | | ASVGDRVTITCRASQSISSYLNWYQQKPGKAPKLLIYAASSLQSGVPS |
| | | RFSGSGSGTDFTLTISSLQPEDFATYYCQQSYSTPYTFGQGTKVEIK |
| 139109-nt | 968 | GAAGTGCAATTGGTGGAATCAGGGGGAGGACTTGTGCAGCCTGGAGGA |
| ScFv domain | | TCGCTGAGACTGTCATGTGCCGTGTCCGGCTTTGCCCTGTCCAACCAC |
| | | GGGATGTCCTGGGTCCGCCGCGCGCCTGGAAAGGGCCTCGAATGGGTG |
| | | TCGGGTATTGTGTACAGCGGTAGCACCTACTATGCCGCATCCGTGAAG |
| | | GGGAGATTCACCATCAGCCGGGACAACTCCAGGAACACTCTGTACCTC |
| | | CAAATGAATTCGCTGAGGCCAGAGGACACTGCCATCTACTACTGCTCC |
| | | GCGCATGGCGGAGAGTCCGACGTCTGGGGACAGGGGACCACCGTGACC |
| | | GTGTCTAGCGCGTCCGGCGGAGGCGGCAGCGGGGGTCGGGCATCAGGG |
| | | GGCGGCGGATCGGACATCCAGCTCACCCAGTCCCCGAGCTCGCTGTCC |
| | | GCCTCCGTGGGAGATCGGGTCACCATCACGTGCCGCGCCAGCCAGTCG |
| | | ATTTCCTCCTACCTGAACTGGTACCAACAGAAGCCCGGAAAAGCCCCG |
| | | AAGCTTCTCATCTACGCCGCCTCGAGCCTGCAGTCAGGAGTGCCCTCA |
| | | CGGTTCTCCGGCTCCGGTTCCGGTACTGATTTCACCCTGACCATTTCC |
| | | TCCCTGCAACCGGAGGACTTCGCTACTTACTACTGCCAGCAGTCGTAC |
| | | TCCACCCCCTACACTTTCGGACAAGGCACCAAGGTCGAAATCAAG |
| 139109-aa | 969 | EVQLVESGGGLVQPGGSLRLSCAVSGFALSNHGMSWVRRAPGKGLEWV |
| VH | | SGIVYSGSTYYAASVKGRFTISRDNSRNTLYLQMNSLRPEDTAIYYCS |
| | | AHGGESDVWGQGTTVTVSS |
| 139109-aa | 970 | DIQLTQSPSSLSASVGDRVTITCRASQSISSYLNWYQQKPGKAPKLLI |
| VL | | YAASSLQSGVPSRFSGSGSGTDFTLTISSLQPEDFATYYCQQSYSTPY |
| | | TFGQGTKVEIK |
| 139109-aa | 971 | MALPVTALLLPLALLLHAARPEVQLVESGGGLVQPGGSLRLSCAVSGF |
| Full CAR | | ALSNHGMSWVRRAPGKGLEWVSGIVYSGSTYYAASVKGRFTISRDNSR |
| | | NTLYLQMNSLRPEDTAIYYCSAHGGESDVWGQGTTVTVSSASGGGGSG |
| | | GRASGGGGSDIQLTQSPSSLSASVGDRVTITCRASQSISSYLNWYQQK |
| | | PGKAPKLLIYAASSLQSGVPSRFSGSGSGTDFTLTISSLQPEDFATYY |
| | | CQQSYSTPYTFGQGTKVEIKTTTPAPRPPTPAPTIASQPLSLRPEACR |
| | | PAAGGAVHTRGLDFACDIYIWAPLAGTCGVLLLSLVITLYCKRGRKKL |
| | | LYIFKQPFMRPVQTTQEEDGCSCRFPEEEEGGCELRVKFSRSADAPAY |
| | | KQGQNQLYNELNLGRREEYDVLDKRRGRDPEMGGKPRRKNPQEGLYNE |
| | | LQKDKMAEAYSEIGMKGERRRGKGHDGLYQGLSTATKDTYDALHMQAL |
| | | PPR |
| 139109-nt | 972 | ATGGCCCTCCCTGTCACCGCCCTGCTGCTTCCGCTGGCTCTTCTGCTC |
| Full CAR | | CACGCCGCTCGGCCCGAAGTGCAATTGGTGGAATCAGGGGGAGGACTT |
| | | GTGCAGCCTGGAGGATCGCTGAGACTGTCATGTGCCGTGTCCGGCTTT |
| | | GCCCTGTCCAACCACGGGATGTCCTGGGTCCGCCGCGCGCCTGGAAAG |
| | | GGCCTCGAATGGGTGTCGGGTATTGTGTACAGCGGTAGCACCTACTAT |
| | | GCCGCATCCGTGAAGGGGAGATTCACCATCAGCCGGGACAACTCCAGG |
| | | AACACTCTGTACCTCCAAATGAATTCGCTGAGGCCAGAGGACACTGCC |
| | | ATCTACTACTGCTCCGCGCATGGCGGAGAGTCCGACGTCTGGGGACAG |
| | | GGGACCACCGTGACCGTGTCTAGCGCGTCCGGCGGAGGCGGCAGCGGG |
| | | GGTCGGGCATCAGGGGGCGGCGGATCGGACATCCAGCTCACCCAGTCC |
| | | CCGAGCTCGCTGTCCGCCTCCGTGGGAGATCGGGTCACCATCACGTGC |
| | | CGCGCCAGCCAGTCGATTTCCTCCTACCTGAACTGGTACCAACAGAAG |
| | | CCCGGAAAAGCCCCGAAGCTTCTCATCTACGCCGCCTCGAGCCTGCAG |
| | | TCAGGAGTGCCCTCACGGTTCTCCGGCTCCGGTTCCGGTACTGATTTC |
| | | ACCCTGACCATTTCCTCCCTGCAACCGGAGGACTTCGCTACTTACTAC |
| | | TGCCAGCAGTCGTACTCCACCCCCTACACTTTCGGACAAGGCACCAAG |
| | | GTCGAAATCAAGACCACTACCCCAGCACCGAGGCCACCCACCCCGGCT |
| | | CCTACCATCGCCTCCCAGCCTCTGTCCCTGCGTCCGGAGGCATGTAGA |
| | | CCCGCAGCTGGTGGGGCCGTGCATACCCGGGGTCTTGACTTCGCCTGC |
| | | GATATCTACATTTGGGCCCCTCTGGCTGGTACTTGCGGGGTCCTGCTG |
| | | CTTTCACTCGTGATCACTCTTTACTGTAAGCGCGGTCGGAAGAAGCTG |
| | | CTGTACATCTTTAAGCAACCCTTCATGAGGCCTGTGCAGACTACTCAA |
| | | GAGGAGGACGGCTGTTCATGCCGGTTCCCAGAGGAGGAGGAAGGCGGC |
| | | TGCGAACTGCGCGTGAAATTCAGCCGCAGCGCAGATGCTCCAGCCTAC |
| | | AAGCAGGGGCAGAACCAGCTCTACAACGAACTCAATCTTGGTCGGAGA |
| | | GAGGAGTACGACGTGCTGGACAAGCGGAGAGGACGGGACCCAGAAATG |
| | | GGCGGGAAGCCGCGCAGAAAGAATCCCCAAGAGGGCCTGTACAACGAG |
| | | CTCCAAAAGGATAAGATGGCAGAAGCCTATAGCGAGATTGGTATGAAA |
| | | GGGGAACGCAGAAGAGGCAAAGGCCACGACGGACTGTACCAGGGACTC |
| | | AGCACCGCCACCAAGGACACCTATGACGCTCTTCACATGCAGGCCCTG |
| | | CCGCCTCGG |

139103

| | | |
|---|---|---|
| 139103-aa | 973 | QVQLVESGGGLVQPGRSLRLSCAASGFTFSNYAMSWVRQAPGKGLGWV |
| ScFv domain | | SGISRSGENTYYADSVKGRFTISRDNSKNTLYLQMNSLRDEDTAVYYC |
| | | ARSPAHYYGGMDVWGQGTTVTVSSASGGGGSGGRASGGGGSDIVLTQS |
| | | PGTLSLSPGERATLSCRASQSISSSFLAWYQQKPGQAPRLLIYGASRR |
| | | ATGIPDRFSGSGSGTDFTLTISRLEPEDSAVYYCQQYHSSPSWTFGQG |
| | | TKLEIK |
| 139103-nt | 974 | CAAGTGCAACTCGTGGAATCTGGTGGAGGACTCGTGCAACCCGGAAGA |
| ScFv domain | | TCGCTTAGACTGTCGTGTGCCGCCAGCGGGTTCACTTTCTCGAACTAC |
| | | GCGATGTCCTGGGTCCGCCAGGCACCCGGAAAGGGACTCGGTTGGGTG |
| | | TCCGGCATTTCCCGGTCCGGCGAAAATACCTACTACGCCGACTCCGTG |
| | | AAGGGCCGCTTCACCATCTCAAGGGACAACAGCAAAAACACCCTGTAC |
| | | TTGCAAATGAACTCCCTGCGGGATGAAGATACAGCCGTGTACTATTGC |
| | | GCCCGGTCGCCTGCCCATTACTACGGCGGAATGGACGTCTGGGGACAG |
| | | GGAACCACTGTGACTGTCAGCAGCGCGTCGGGTGGCGGCGGCTCAGGG |
| | | GGTCGGGCCTCCGGGGGGGGAGGGTCCGACATCGTGCTGACCCAGTCC |
| | | CCGGGAACCCTGAGCCTGAGCCCGGGAGAGCGCGCGACCCTGTCATGC |
| | | CGGGCATCCCAGAGCATTAGCTCCTCCTTTCTCGCCTGGTATCAGCAG |
| | | AAGCCCGGACAGGCCCCGAGGCTGCTGATCTACGGCGCTAGCAGAAGG |
| | | GCTACCGGAATCCCAGACCGGTTCTCCGGCTCCGGTTCCGGGACCGAT |
| | | TTCACCCTTACTATCTCGCGCCTGGAACCTGAGGACTCCGCCGTCTAC |
| | | TACTGCCAGCAGTACCACTCATCCCCGTCGTGGACGTTCGGACAGGGC |
| | | ACCAAGCTGGAGATTAAG |
| 139103-aa | 975 | QVQLVESGGGLVQPGRSLRLSCAASGFTFSNYAMSWVRQAPGKGLGWV |
| VH | | SGISRSGENTYYADSVKGRFTISRDNSKNTLYLQMNSLRDEDTAVYYC |
| | | ARSPAHYYGGMDVWGQGTTVTVSS |
| 139103-aa | 976 | DIVLTQSPGTLSLSPGERATLSCRASQSISSSFLAWYQQKPGQAPRLL |
| VL | | IYGASRRATGIPDRFSGSGSGTDFTLTISRLEPEDSAVYYCQQYHSSP |
| | | SWTFGQGTKLEIK |
| 139103-aa | 977 | MALPVTALLLPLALLLHAARPQVQLVESGGGLVQPGRSLRLSCAASGF |
| Full CAR | | TFSNYAMSWVRQAPGKGLGWVSGISRSGENTYYADSVKGRFTISRDNS |
| | | KNTLYLQMNSLRDEDTAVYYCARSPAHYYGGMDVWGQGTTVTVSSASG |
| | | GGGSGGRASGGGGSDIVLTQSPGTLSLSPGERATLSCRASQSISSSFL |
| | | AWYQQKPGQAPRLLIYGASRRATGIPDRFSGSGSGTDFTLTISRLEPE |
| | | DSAVYYCQQYHSSPSWTFGQGTKLEIKTTTPAPRPPTPAPTIASQPLS |
| | | LRPEACRPAAGGAVHTRGLDFACDIYIWAPLAGTCGVLLLSLVITLYC |
| | | KRGRKKLLYIFKQPFMRPVQTTQEEDGCSCRFPEEEEGGCELRVKFSR |
| | | SADAPAYKQGQNQLYNELNLGRREEYDVLDKRRGRDPEMGGKPRRKNP |
| | | QEGLYNELQKDKMAEAYSEIGMKGERRRGKGHDGLYQGLSTATKDTYD |
| | | ALHMQALPPR |
| 139103-nt | 978 | ATGGCCCTCCCTGTCACCGCCCTGCTGCTTCCGCTGGCTCTTCTGCTC |
| Full CAR | | CACGCCGCTCGGCCCCAAGTGCAACTCGTGGAATCTGGTGGAGGACTC |
| | | GTGCAACCCGGAAGATCGCTTAGACTGTCGTGTGCCGCCAGCGGGTTC |
| | | ACTTTCTCGAACTACGCGATGTCCTGGGTCCGCCAGGCACCCGGAAAG |
| | | GGACTCGGTTGGGTGTCCGGCATTTCCCGGTCCGGCGAAAATACCTAC |
| | | TACGCCGACTCCGTGAAGGGCCGCTTCACCATCTCAAGGGACAACAGC |
| | | AAAAACACCCTGTACTTGCAAATGAACTCCCTGCGGGATGAAGATACA |
| | | GCCGTGTACTATTGCGCCCGGTCGCCTGCCCATTACTACGGCGGAATG |
| | | GACGTCTGGGGACAGGGAACCACTGTGACTGTCAGCAGCGCGTCGGGT |
| | | GGCGGCGGCTCAGGGGGTCGGGCCTCCGGGGGGGGAGGGTCCGACATC |
| | | GTGCTGACCCAGTCCCCGGGAACCCTGAGCCTGAGCCCGGGAGAGCGC |
| | | GCGACCCTGTCATGCCGGGCATCCCAGAGCATTAGCTCCTCCTTTCTC |
| | | GCCTGGTATCAGCAGAAGCCCGGACAGGCCCCGAGGCTGCTGATCTAC |
| | | GGCGCTAGCAGAAGGGCTACCGGAATCCCAGACCGGTTCTCCGGCTCC |
| | | GGTTCCGGGACCGATTTCACCCTTACTATCTCGCGCCTGGAACCTGAG |
| | | GACTCCGCCGTCTACTACTGCCAGCAGTACCACTCATCCCCGTCGTGG |
| | | ACGTTCGGACAGGGCACCAAGCTGGAGATTAAGACCACTACCCCAGCA |
| | | CCGAGGCCACCCACCCCGGCTCCTACCATCGCCTCCCAGCCTCTGTCC |
| | | CTGCGTCCGGAGGCATGTAGACCCGCAGCTGGTGGGGCCGTGCATACC |
| | | CGGGGTCTTGACTTCGCCTGCGATATCTACATTTGGGCCCCTCTGGCT |
| | | GGTACTTGCGGGGTCCTGCTGCTTTCACTCGTGATCACTCTTTACTGT |
| | | AAGCGCGGTCGGAAGAAGCTGCTGTACATCTTTAAGCAACCCTTCATG |
| | | AGGCCTGTGCAGACTACTCAAGAGGAGGACGGCTGTTCATGCCGGTTC |
| | | CCAGAGGAGGAGGAAGGCGGCTGCGAACTGCGCGTGAAATTCAGCCGC |
| | | AGCGCAGATGCTCCAGCCTACAAGCAGGGGCAGAACCAGCTCTACAAC |
| | | GAACTCAATCTTGGTCGGAGAGAGGAGTACGACGTGCTGGACAAGCGG |
| | | AGAGGACGGGACCCAGAAATGGGCGGGAAGCCGCGCAGAAAGAATCCC |
| | | CAAGAGGGCCTGTACAACGAGCTCCAAAAGGATAAGATGGCAGAAGCC |
| | | TATAGCGAGATTGGTATGAAAGGGGAACGCAGAAGAGGCAAAGGCCAC |
| | | GACGGACTGTACCAGGGACTCAGCACCGCCACCAAGGACACCTATGAC |
| | | GCTCTTCACATGCAGGCCCTGCCGCCTCGG |

139105

| | | |
|---|---|---|
| 139105-aa | 979 | QVQLVESGGGLVQPGRSLRLSCAASGFTFDDYAMHWVRQAPGKGLEWV |
| ScFv domain | | SGISWNSGSIGYADSVKGRFTISRDNAKNSLYLQMNSLRAEDTALYYC |
| | | SVHSFLAYWGQGTLVTVSSASGGGGSGGRASGGGGSDIVMTQTPLSLP |
| | | VTPGEPASISCRSSQSLLHSNGYNYLDWYLQKPGQSPQLLIYLGSNRA |
| | | SGVPDRFSGSGSGTDFTLKISRVEAEDVGVYYCMQALQTPYTFGQGTK |
| | | VEIK |
| 139105-nt | 980 | CAAGTGCAACTCGTCGAATCCGGTGGAGGTCTGGTCCAACCTGGTAGA |
| ScFv domain | | AGCCTGAGACTGTCGTGTGCGGCCAGCGGATTCACCTTTGATGACTAT |
| | | GCTATGCACTGGGTGCGGCAGGCCCCAGGAAAGGGCCTGGAATGGGTG |
| | | TCGGGAATTAGCTGGAACTCCGGGTCCATTGGCTACGCCGACTCCGTG |
| | | AAGGGCCGCTTCACCATCTCCCGCGACAACGCAAAGAACTCCCTGTAC |
| | | TTGCAAATGAACTCGCTCAGGGCTGAGGATACCGCGCTGTACTACTGC |
| | | TCCGTGCATTCCTTCCTGGCCTACTGGGGACAGGGAACTCTGGTCACC |
| | | GTGTCGAGCGCCTCCGGCGGCGGGGGCTCGGGTGGACGGGCCTCGGGC |
| | | GGAGGGGGGTCCGACATCGTGATGACCCAGACCCCGCTGAGCTTGCCC |
| | | GTGACTCCCGGAGAGCCTGCATCCATCTCCTGCCGGTCATCCCAGTCC |
| | | CTTCTCCACTCCAACGGATACAACTACCTCGACTGGTACCTCCAGAAG |
| | | CCGGGACAGAGCCCTCAGCTTCTGATCTACCTGGGGTCAAATAGAGCC |
| | | TCAGGAGTGCCGGATCGGTTCAGCGGATCTGGTTCGGGAACTGATTTC |
| | | ACTCTGAAGATTTCCCGCGTGGAAGCCGAGGACGTGGGCGTCTACTAC |
| | | TGTATGCAGGCGCTGCAGACCCCCTATACCTTCGGCCAAGGGACGAAA |
| | | GTGGAGATCAAG |
| 139105-aa | 981 | QVQLVESGGGLVQPGRSLRLSCAASGFTFDDYAMHWVRQAPGKGLEWV |
| VH | | SGISWNSGSIGYADSVKGRFTISRDNAKNSLYLQMNSLRAEDTALYYC |
| | | SVHSFLAYWGQGTLVTVSS |
| 139105-aa | 982 | DIVMTQTPLSLPVTPGEPASISCRSSQSLLHSNGYNYLDWYLQKPGQS |
| VL | | PQLLIYLGSNRASGVPDRFSGSGSGTDFTLKISRVEAEDVGVYYCMQA |
| | | LQTPYTFGQGTKVEIK |
| 139105-aa | 983 | MALPVTALLLPLALLLHAARPQVQLVESGGGLVQPGRSLRLSCAASGF |
| Full CAR | | TFDDYAMHWVRQAPGKGLEWVSGISWNSGSIGYADSVKGRFTISRDNA |
| | | KNSLYLQMNSLRAEDTALYYCSVHSFLAYWGQGTLVTVSSASGGGGSG |
| | | GRASGGGGSDIVMTQTPLSLPVTPGEPASISCRSSQSLLHSNGYNYLD |
| | | WYLQKPGQSPQLLIYLGSNRASGVPDRFSGSGSGTDFTLKISRVEAED |
| | | VGVYYCMQALQTPYTFGQGTKVEIKTTTPAPRPPTPAPTIASQPLSLR |
| | | PEACRPAAGGAVHTRGLDFACDIYIWAPLAGTCGVLLLSLVITLYCKR |
| | | GRKKLLYIFKQPFMRPVQTTQEEDGCSCRFPEEEEGGCELRVKFSRSA |
| | | DAPAYKQGQNQLYNELNLGRREEYDVLDKRRGRDPEMGGKPRRKNPQE |
| | | GLYNELQKDKMAEAYSEIGMKGERRRGKGHDGLYQGLSTATKDTYDAL |
| | | HMQALPPR |
| 139105-nt | 984 | ATGGCCCTCCCTGTCACCGCCCTGCTGCTTCCGCTGGCTCTTCTGCTC |
| Full CAR | | CACGCCGCTCGGCCCCAAGTGCAACTCGTCGAATCCGGTGGAGGTCTG |
| | | GTCCAACCTGGTAGAAGCCTGAGACTGTCGTGTGCGGCCAGCGGATTC |
| | | ACCTTTGATGACTATGCTATGCACTGGGTGCGGCAGGCCCCAGGAAAG |
| | | GGCCTGGAATGGGTGTCGGGAATTAGCTGGAACTCCGGGTCCATTGGC |
| | | TACGCCGACTCCGTGAAGGGCCGCTTCACCATCTCCCGCGACAACGCA |
| | | AAGAACTCCCTGTACTTGCAAATGAACTCGCTCAGGGCTGAGGATACC |
| | | GCGCTGTACTACTGCTCCGTGCATTCCTTCCTGGCCTACTGGGGACAG |
| | | GGAACTCTGGTCACCGTGTCGAGCGCCTCCGGCGGCGGGGGCTCGGGT |
| | | GGACGGGCCTCGGGCGGAGGGGGGTCCGACATCGTGATGACCCAGACC |
| | | CCGCTGAGCTTGCCCGTGACTCCCGGAGAGCCTGCATCCATCTCCTGC |
| | | CGGTCATCCCAGTCCCTTCTCCACTCCAACGGATACAACTACCTCGAC |
| | | TGGTACCTCCAGAAGCCGGGACAGAGCCCTCAGCTTCTGATCTACCTG |
| | | GGGTCAAATAGAGCCTCAGGAGTGCCGGATCGGTTCAGCGGATCTGGT |
| | | TCGGGAACTGATTTCACTCTGAAGATTTCCCGCGTGGAAGCCGAGGAC |
| | | GTGGGCGTCTACTACTGTATGCAGGCGCTGCAGACCCCCTATACCTTC |
| | | GGCCAAGGGACGAAAGTGGAGATCAAGACCACTACCCCAGCACCGAGG |
| | | CCACCCACCCCGGCTCCTACCATCGCCTCCCAGCCTCTGTCCCTGCGT |
| | | CCGGAGGCATGTAGACCCGCAGCTGGTGGGGCCGTGCATACCCGGGGT |
| | | CTTGACTTCGCCTGCGATATCTACATTTGGGCCCCTCTGGCTGGTACT |
| | | TGCGGGGTCCTGCTGCTTTCACTCGTGATCACTCTTTACTGTAAGCGC |
| | | GGTCGGAAGAAGCTGCTGTACATCTTTAAGCAACCCTTCATGAGGCCT |
| | | GTGCAGACTACTCAAGAGGAGGACGGCTGTTCATGCCGGTTCCCAGAG |
| | | GAGGAGGAAGGCGGCTGCGAACTGCGCGTGAAATTCAGCCGCAGCGCA |
| | | GATGCTCCAGCCTACAAGCAGGGGCAGAACCAGCTCTACAACGAACTC |
| | | AATCTTGGTCGGAGAGAGGAGTACGACGTGCTGGACAAGCGGAGAGGA |
| | | CGGGACCCAGAAATGGGCGGGAAGCCGCGCAGAAAGAATCCCCAAGAG |
| | | GGCCTGTACAACGAGCTCCAAAAGGATAAGATGGCAGAAGCCTATAGC |
| | | GAGATTGGTATGAAAGGGGAACGCAGAAGAGGCAAAGGCCACGACGGA |
| | | CTGTACCAGGGACTCAGCACCGCCACCAAGGACACCTATGACGCTCTT |
| | | CACATGCAGGCCCTGCCGCCTCGG |

139111

| | | |
|---|---|---|
| 139111-aa | 985 | EVQLLESGGGLVQPGGSLRLSCAVSGFALSNHGMSWVRRAPGKGLEWV |
| ScFv domain | | SGIVYSGSTYYAASVKGRFTISRDNSRNTLYLQMNSLRPEDTAIYYCS |
| | | AHGGESDVWGQGTTVTVSSASGGGGSGGRASGGGGSDIVMTQTPLSLS |
| | | VTPGQPASISCKSSQSLLRNDGKTPLYWYLQKAGQPPQLLIYEVSNRF |
| | | SGVPDRFSGSGSGTDFTLKISRVEAEDVGAYYCMQNIQFPSFGGGTKL |
| | | EIK |
| 139111-nt | 986 | GAAGTGCAATTGTTGGAATCTGGAGGAGGACTTGTGCAGCCTGGAGGA |
| ScFv domain | | TCACTGAGACTTTCGTGTGCGGTGTCAGGCTTCGCCCTGAGCAACCAC |
| | | GGCATGAGCTGGGTGCGGAGAGCCCCGGGGAAGGGTCTGGAATGGGTG |
| | | TCCGGGATCGTCTACTCCGGTTCAACTTACTACGCCGCAAGCGTGAAG |
| | | GGTCGCTTCACCATTTCCCGCGATAACTCCCGGAACACCCTGTACCTC |
| | | CAAATGAACTCCCTGCGGCCCGAGGACACCGCCATCTACTACTGTTCC |
| | | GCGCATGGAGGAGAGTCCGATGTCTGGGGACAGGGCACTACCGTGACC |
| | | GTGTCGAGCGCCTCGGGGGGAGGAGGCTCCGGCGGTCGCGCCTCCGGG |
| | | GGGGGTGGCAGCGACATTGTGATGACGCAGACTCCACTCTCGCTGTCC |
| | | GTGACCCCGGGACAGCCCGCGTCCATCTCGTGCAAGAGCTCCCAGAGC |
| | | CTGCTGAGGAACGACGGAAAGACTCCTCTGTATTGGTACCTCCAGAAG |
| | | GCTGGACAGCCCCCGCAACTGCTCATCTACGAAGTGTCAAATCGCTTC |
| | | TCCGGGGTGCCGGATCGGTTTTCCGGCTCGGGATCGGGCACCGACTTC |
| | | ACCCTGAAAATCTCCAGGGTCGAGGCCGAGGACGTGGGAGCCTACTAC |
| | | TGCATGCAAAACATCCAGTTCCCTTCCTTCGGCGGCGGCACAAAGCTG |
| | | GAGATTAAG |
| 139111-aa | 987 | EVQLLESGGGLVQPGGSLRLSCAVSGFALSNHGMSWVRRAPGKGLEWV |
| VH | | SGIVYSGSTYYAASVKGRFTISRDNSRNTLYLQMNSLRPEDTAIYYCS |
| | | AHGGESDVWGQGTTVTVSS |
| 139111-aa | 988 | DIVMTQTPLSLSVTPGQPASISCKSSQSLLRNDGKTPLYWYLQKAGQP |
| VL | | PQLLIYEVSNRFSGVPDRFSGSGSGTDFTLKISRVEAEDVGAYYCMQN |
| | | IQFPSFGGGTKLEIK |
| 139111-aa | 989 | MALPVTALLLPLALLLHAARPEVQLLESGGGLVQPGGSLRLSCAVSGF |
| Full CAR | | ALSNHGMSWVRRAPGKGLEWVSGIVYSGSTYYAASVKGRFTISRDNSR |
| | | NTLYLQMNSLRPEDTAIYYCSAHGGESDVWGQGTTVTVSSASGGGGSG |
| | | GRASGGGGSDIVMTQTPLSLSVTPGQPASISCKSSQSLLRNDGKTPLY |
| | | WYLQKAGQPPQLLIYEVSNRFSGVPDRFSGSGSGTDFTLKISRVEAED |
| | | VGAYYCMQNIQFPSFGGGTKLEIKTTTPAPRPPTPAPTIASQPLSLRP |
| | | EACRPAAGGAVHTRGLDFACDIYIWAPLAGTCGVLLLSLVITLYCKRG |
| | | RKKLLYIFKQPFMRPVQTTQEEDGCSCRFPEEEEGGCELRVKFSRSAD |
| | | APAYKQGQNQLYNELNLGRREEYDVLDKRRGRDPEMGGKPRRKNPQEG |
| | | LYNELQKDKMAEAYSEIGMKGERRRGKGHDGLYQGLSTATKDTYDALH |
| | | MQALPPR |
| 139111-nt | 990 | ATGGCCCTCCCTGTCACCGCCCTGCTGCTTCCGCTGGCTCTTCTGCTC |
| Full CAR | | CACGCCGCTCGGCCCGAAGTGCAATTGTTGGAATCTGGAGGAGGACTT |
| | | GTGCAGCCTGGAGGATCACTGAGACTTTCGTGTGCGGTGTCAGGCTTC |
| | | GCCCTGAGCAACCACGGCATGAGCTGGGTGCGGAGAGCCCCGGGGAAG |
| | | GGTCTGGAATGGGTGTCCGGGATCGTCTACTCCGGTTCAACTTACTAC |
| | | GCCGCAAGCGTGAAGGGTCGCTTCACCATTTCCCGCGATAACTCCCGG |
| | | AACACCCTGTACCTCCAAATGAACTCCCTGCGGCCCGAGGACACCGCC |
| | | ATCTACTACTGTTCCGCGCATGGAGGAGAGTCCGATGTCTGGGGACAG |
| | | GGCACTACCGTGACCGTGTCGAGCGCCTCGGGGGGAGGAGGCTCCGGC |
| | | GGTCGCGCCTCCGGGGGGGGTGGCAGCGACATTGTGATGACGCAGACT |
| | | CCACTCTCGCTGTCCGTGACCCCGGGACAGCCCGCGTCCATCTCGTGC |
| | | AAGAGCTCCCAGAGCCTGCTGAGGAACGACGGAAAGACTCCTCTGTAT |
| | | TGGTACCTCCAGAAGGCTGGACAGCCCCCGCAACTGCTCATCTACGAA |
| | | GTGTCAAATCGCTTCTCCGGGGTGCCGGATCGGTTTTCCGGCTCGGGA |
| | | TCGGGCACCGACTTCACCCTGAAAATCTCCAGGGTCGAGGCCGAGGAC |
| | | GTGGGAGCCTACTACTGCATGCAAAACATCCAGTTCCCTTCCTTCGGC |
| | | GGCGGCACAAAGCTGGAGATTAAGACCACTACCCCAGCACCGAGGCCA |
| | | CCCACCCCGGCTCCTACCATCGCCTCCCAGCCTCTGTCCCTGCGTCCG |
| | | GAGGCATGTAGACCCGCAGCTGGTGGGGCCGTGCATACCCGGGGTCTT |
| | | GACTTCGCCTGCGATATCTACATTTGGGCCCCTCTGGCTGGTACTTGC |
| | | GGGGTCCTGCTGCTTTCACTCGTGATCACTCTTTACTGTAAGCGCGGT |
| | | CGGAAGAAGCTGCTGTACATCTTTAAGCAACCCTTCATGAGGCCTGTG |
| | | CAGACTACTCAAGAGGAGGACGGCTGTTCATGCCGGTTCCCAGAGGAG |
| | | GAGGAAGGCGGCTGCGAACTGCGCGTGAAATTCAGCCGCAGCGCAGAT |
| | | GCTCCAGCCTACAAGCAGGGGCAGAACCAGCTCTACAACGAACTCAAT |
| | | CTTGGTCGGAGAGAGGAGTACGACGTGCTGGACAAGCGGAGAGGACGG |
| | | GACCCAGAAATGGGCGGGAAGCCGCGCAGAAAGAATCCCCAAGAGGGC |
| | | CTGTACAACGAGCTCCAAAAGGATAAGATGGCAGAAGCCTATAGCGAG |
| | | ATTGGTATGAAAGGGGAACGCAGAAGAGGCAAAGGCCACGACGGACTG |
| | | TACCAGGGACTCAGCACCGCCACCAAGGACACCTATGACGCTCTTCAC |
| | | ATGCAGGCCCTGCCGCCTCGG |

139100

| | | |
|---|---|---|
| 139100-aa | 991 | QVQLVQSGAEVRKTGASVKVSCKASGYIFDNFGINWVRQAPGQGLEWM |
| ScFv domain | | GWINPKNNNTNYAQKFQGRVTITADESTNTAYMEVSSLRSEDTAVYYC |
| | | ARGPYYYQSYMDVWGQGTMVTVSSASGGGGSGGRASGGGGSDIVMTQT |
| | | PLSLPVTPGEPASISCRSSQSLLHSNGYNYLNWYLQKPGQSPQLLIYL |
| | | GSKRASGVPDRFSGSGSGTDFTLHITRVGAEDVGVYYCMQALQTPYTF |
| | | GQGTKLEIK |
| 139100-nt | 992 | CAAGTCCAACTCGTCCAGTCCGGCGCAGAAGTCAGAAAAACCGGTGCT |
| ScFv domain | | AGCGTGAAAGTGTCCTGCAAGGCCTCCGGCTACATTTTCGATAACTTC |
| | | GGAATCAACTGGGTCAGACAGGCCCCGGGCCAGGGGCTGGAATGGATG |
| | | GGATGGATCAACCCCAAGAACAACAACACCAACTACGCACAGAAGTTC |
| | | CAGGGCCGCGTGACTATCACCGCCGATGAATCGACCAATACCGCCTAC |
| | | ATGGAGGTGTCCTCCCTGCGGTCGGAGGACACTGCCGTGTATTACTGC |
| | | GCGAGGGGCCCATACTACTACCAAAGCTACATGGACGTCTGGGGACAG |
| | | GGAACCATGGTGACCGTGTCATCCGCCTCCGGTGGTGGAGGCTCCGGG |
| | | GGGCGGGCTTCAGGAGGCGGAGGAAGCGATATTGTGATGACCCAGACT |
| | | CCGCTTAGCCTGCCCGTGACTCCTGGAGAACCGGCCTCCATTTCCTGC |
| | | CGGTCCTCGCAATCACTCCTGCATTCCAACGGTTACAACTACCTGAAT |
| | | TGGTACCTCCAGAAGCCTGGCCAGTCGCCCCAGTTGCTGATCTATCTG |
| | | GGCTCGAAGCGCGCCTCCGGGGTGCCTGACCGGTTTAGCGGATCTGGG |
| | | AGCGGCACGGACTTCACTCTCCACATCACCCGCGTGGGAGCGGAGGAC |
| | | GTGGGAGTGTACTACTGTATGCAGGCGCTGCAGACTCCGTACACATTC |
| | | GGACAGGGCACCAAGCTGGAGATCAAG |
| 139100-aa | 993 | QVQLVQSGAEVRKTGASVKVSCKASGYIFDNFGINWVRQAPGQGLEWM |
| VH | | GWINPKNNNTNYAQKFQGRVTITADESTNTAYMEVSSLRSEDTAVYYC |
| | | ARGPYYYQSYMDVWGQGTMVTVSS |
| 139100-aa | 994 | DIVMTQTPLSLPVTPGEPASISCRSSQSLLHSNGYNYLNWYLQKPGQS |
| VL | | PQLLIYLGSKRASGVPDRFSGSGSGTDFTLHITRVGAEDVGVYYCMQA |
| | | LQTPYTFGQGTKLEIK |
| 139100-aa | 995 | MALPVTALLLPLALLLHAARPQVQLVQSGAEVRKTGASVKVSCKASGY |
| Full CAR | | IFDNFGINWVRQAPGQGLEWMGWINPKNNNTNYAQKFQGRVTITADES |
| | | TNTAYMEVSSLRSEDTAVYYCARGPYYYQSYMDVWGQGTMVTVSSASG |
| | | GGGSGGRASGGGGSDIVMTQTPLSLPVTPGEPASISCRSSQSLLHSNG |
| | | YNYLNWYLQKPGQSPQLLIYLGSKRASGVPDRFSGSGSGTDFTLHITR |
| | | VGAEDVGVYYCMQALQTPYTFGQGTKLEIKTTTPAPRPPTPAPTIASQ |
| | | PLSLRPEACRPAAGGAVHTRGLDFACDIYIWAPLAGTCGVLLLSLVIT |
| | | LYCKRGRKKLLYIFKQPFMRPVQTTQEEDGCSCRFPEEEEGGCELRVK |
| | | FSRSADAPAYKQGQNQLYNELNLGRREEYDVLDKRRGRDPEMGGKPRR |
| | | KNPQEGLYNELQKDKMAEAYSEIGMKGERRRGKGHDGLYQGLSTATKD |
| | | TYDALHMQALPPR |
| 139100-nt | 996 | ATGGCCCTCCCTGTCACCGCCCTGCTGCTTCCGCTGGCTCTTCTGCTC |
| Full CAR | | CACGCCGCTCGGCCCCAAGTCCAACTCGTCCAGTCCGGCGCAGAAGTC |
| | | AGAAAAACCGGTGCTAGCGTGAAAGTGTCCTGCAAGGCCTCCGGCTAC |
| | | ATTTTCGATAACTTCGGAATCAACTGGGTCAGACAGGCCCCGGGCCAG |
| | | GGGCTGGAATGGATGGGATGGATCAACCCCAAGAACAACAACACCAAC |
| | | TACGCACAGAAGTTCCAGGGCCGCGTGACTATCACCGCCGATGAATCG |
| | | ACCAATACCGCCTACATGGAGGTGTCCTCCCTGCGGTCGGAGGACACT |
| | | GCCGTGTATTACTGCGCGAGGGGCCCATACTACTACCAAAGCTACATG |
| | | GACGTCTGGGGACAGGGAACCATGGTGACCGTGTCATCCGCCTCCGGT |
| | | GGTGGAGGCTCCGGGGGGCGGGCTTCAGGAGGCGGAGGAAGCGATATT |
| | | GTGATGACCCAGACTCCGCTTAGCCTGCCCGTGACTCCTGGAGAACCG |
| | | GCCTCCATTTCCTGCCGGTCCTCGCAATCACTCCTGCATTCCAACGGT |
| | | TACAACTACCTGAATTGGTACCTCCAGAAGCCTGGCCAGTCGCCCCAG |
| | | TTGCTGATCTATCTGGGCTCGAAGCGCGCCTCCGGGGTGCCTGACCGG |
| | | TTTAGCGGATCTGGGAGCGGCACGGACTTCACTCTCCACATCACCCGC |
| | | GTGGGAGCGGAGGACGTGGGAGTGTACTACTGTATGCAGGCGCTGCAG |
| | | ACTCCGTACACATTCGGACAGGGCACCAAGCTGGAGATCAAGACCACT |
| | | ACCCCAGCACCGAGGCCACCCACCCCGGCTCCTACCATCGCCTCCCAG |
| | | CCTCTGTCCCTGCGTCCGGAGGCATGTAGACCCGCAGCTGGTGGGGCC |
| | | GTGCATACCCGGGGTCTTGACTTCGCCTGCGATATCTACATTTGGGCC |
| | | CCTCTGGCTGGTACTTGCGGGGTCCTGCTGCTTTCACTCGTGATCACT |
| | | CTTTACTGTAAGCGCGGTCGGAAGAAGCTGCTGTACATCTTTAAGCAA |
| | | CCCTTCATGAGGCCTGTGCAGACTACTCAAGAGGAGGACGGCTGTTCA |
| | | TGCCGGTTCCCAGAGGAGGAGGAAGGCGGCTGCGAACTGCGCGTGAAA |
| | | TTCAGCCGCAGCGCAGATGCTCCAGCCTACAAGCAGGGGCAGAACCAG |
| | | CTCTACAACGAACTCAATCTTGGTCGGAGAGAGGAGTACGACGTGCTG |
| | | GACAAGCGGAGAGGACGGGACCCAGAAATGGGCGGGAAGCCGCGCAGA |
| | | AAGAATCCCCAAGAGGGCCTGTACAACGAGCTCCAAAAGGATAAGATG |
| | | GCAGAAGCCTATAGCGAGATTGGTATGAAAGGGGAACGCAGAAGAGGC |
| | | AAAGGCCACGACGGACTGTACCAGGGACTCAGCACCGCCACCAAGGAC |
| | | ACCTATGACGCTCTTCACATGCAGGCCCTGCCGCCTCGG |

139101

| | | |
|---|---|---|
| 139101-aa | 997 | QVQLQESGGGLVQPGGSLRLSCAASGFTFSSDAMTWVRQAPGKGLEWV |
| ScFv domain | | SVISGSGGTTYYADSVKGRFTISRDNSKNTLYLQMNSLRAEDTAVYYC |
| | | AKLDSSGYYYARGPRYWGQGTLVTVSSASGGGGSGGRASGGGGSDIQL |
| | | TQSPSSLSASVGDRVTITCRASQSISSYLNWYQQKPGKAPKLLIYGAS |
| | | TLASGVPARFSGSGSGTHFTLTINSLQSEDSATYYCQQSYKRASFGQG |
| | | TKVEIK |
| 139101-nt | 998 | CAAGTGCAACTTCAAGAATCAGGCGGAGGACTCGTGCAGCCCGGAGGA |
| ScFv domain | | TCATTGCGGCTCTCGTGCGCCGCCTCGGGCTTCACCTTCTCGAGCGAC |
| | | GCCATGACCTGGGTCCGCCAGGCCCCGGGGAAGGGGCTGGAATGGGTG |
| | | TCTGTGATTTCCGGCTCCGGGGGAACTACGTACTACGCCGATTCCGTG |
| | | AAAGGTCGCTTCACTATCTCCCGGGACAACAGCAAGAACACCCTTTAT |
| | | CTGCAAATGAATTCCCTCCGCGCCGAGGACACCGCCGTGTACTACTGC |
| | | GCCAAGCTGGACTCCTCGGGCTACTACTATGCCCGGGGTCCGAGATAC |
| | | TGGGGACAGGGAACCCTCGTGACCGTGTCCTCCGCGTCCGGCGGAGGA |
| | | GGGTCGGGAGGGCGGGCCTCCGGCGGCGGCGGTTCGGACATCCAGCTG |
| | | ACCCAGTCCCCATCCTCACTGAGCGCAAGCGTGGGCGACAGAGTCACC |
| | | ATTACATGCAGGGCGTCCCAGAGCATCAGCTCCTACCTGAACTGGTAC |
| | | CAACAGAAGCCTGGAAAGGCTCCTAAGCTGTTGATCTACGGGGCTTCG |
| | | ACCCTGGCATCCGGGGTGCCCGCGAGGTTTAGCGGAAGCGGTAGCGGC |
| | | ACTCACTTCACTCTGACCATTAACAGCCTCCAGTCCGAGGATTCAGCC |
| | | ACTTACTACTGTCAGCAGTCCTACAAGCGGGCCAGCTTCGGACAGGGC |
| | | ACTAAGGTCGAGATCAAG |
| 139101-aa | 999 | QVQLQESGGGLVQPGGSLRLSCAASGFTFSSDAMTWVRQAPGKGLEWV |
| VH | | SVISGSGGTTYYADSVKGRFTISRDNSKNTLYLQMNSLRAEDTAVYYC |
| | | AKLDSSGYYYARGPRYWGQGTLVTVSS |
| 139101-aa | 1000 | DIQLTQSPSSLSASVGDRVTITCRASQSISSYLNWYQQKPGKAPKLLI |
| VL | | YGASTLASGVPARFSGSGSGTHFTLTINSLQSEDSATYYCQQSYKRAS |
| | | FGQGTKVEIK |
| 139101-aa | 1001 | MALPVTALLLPLALLLHAARPQVQLQESGGGLVQPGGSLRLSCAASGF |
| Full CAR | | TFSSDAMTWVRQAPGKGLEWVSVISGSGGTTYYADSVKGRFTISRDNS |
| | | KNTLYLQMNSLRAEDTAVYYCAKLDSSGYYYARGPRYWGQGTLVTVSS |
| | | ASGGGGSGGRASGGGGSDIQLTQSPSSLSASVGDRVTITCRASQSISS |
| | | YLNWYQQKPGKAPKLLIYGASTLASGVPARFSGSGSGTHFTLTINSLQ |
| | | SEDSATYYCQQSYKRASFGQGTKVEIKTTTPAPRPPTPAPTIASQPLS |
| | | LRPEACRPAAGGAVHTRGLDFACDIYIWAPLAGTCGVLLLSLVITLYC |
| | | KRGRKKLLYIFKQPFMRPVQTTQEEDGCSCRFPEEEEGGCELRVKFSR |
| | | SADAPAYKQGQNQLYNELNLGRREEYDVLDKRRGRDPEMGGKPRRKNP |
| | | QEGLYNELQKDKMAEAYSEIGMKGERRRGKGHDGLYQGLSTATKDTYD |
| | | ALHMQALPPR |
| 139101-nt | 1002 | ATGGCCCTCCCTGTCACCGCCCTGCTGCTTCCGCTGGCTCTTCTGCTC |
| Full CAR | | CACGCCGCTCGGCCCCAAGTGCAACTTCAAGAATCAGGCGGAGGACTC |
| | | GTGCAGCCCGGAGGATCATTGCGGCTCTCGTGCGCCGCCTCGGGCTTC |
| | | ACCTTCTCGAGCGACGCCATGACCTGGGTCCGCCAGGCCCCGGGGAAG |
| | | GGGCTGGAATGGGTGTCTGTGATTTCCGGCTCCGGGGGAACTACGTAC |
| | | TACGCCGATTCCGTGAAAGGTCGCTTCACTATCTCCCGGGACAACAGC |
| | | AAGAACACCCTTTATCTGCAAATGAATTCCCTCCGCGCCGAGGACACC |
| | | GCCGTGTACTACTGCGCCAAGCTGGACTCCTCGGGCTACTACTATGCC |
| | | CGGGGTCCGAGATACTGGGGACAGGGAACCCTCGTGACCGTGTCCTCC |
| | | GCGTCCGGCGGAGGAGGGTCGGGAGGGCGGGCCTCCGGCGGCGGCGGT |
| | | TCGGACATCCAGCTGACCCAGTCCCCATCCTCACTGAGCGCAAGCGTG |
| | | GGCGACAGAGTCACCATTACATGCAGGGCGTCCCAGAGCATCAGCTCC |
| | | TACCTGAACTGGTACCAACAGAAGCCTGGAAAGGCTCCTAAGCTGTTG |
| | | ATCTACGGGGCTTCGACCCTGGCATCCGGGGTGCCCGCGAGGTTTAGC |
| | | GGAAGCGGTAGCGGCACTCACTTCACTCTGACCATTAACAGCCTCCAG |
| | | TCCGAGGATTCAGCCACTTACTACTGTCAGCAGTCCTACAAGCGGGCC |
| | | AGCTTCGGACAGGGCACTAAGGTCGAGATCAAGACCACTACCCCAGCA |
| | | CCGAGGCCACCCACCCCGGCTCCTACCATCGCCTCCCAGCCTCTGTCC |
| | | CTGCGTCCGGAGGCATGTAGACCCGCAGCTGGTGGGGCCGTGCATACC |
| | | CGGGGTCTTGACTTCGCCTGCGATATCTACATTTGGGCCCCTCTGGCT |
| | | GGTACTTGCGGGGTCCTGCTGCTTTCACTCGTGATCACTCTTTACTGT |
| | | AAGCGCGGTCGGAAGAAGCTGCTGTACATCTTTAAGCAACCCTTCATG |
| | | AGGCCTGTGCAGACTACTCAAGAGGAGGACGGCTGTTCATGCCGGTTC |
| | | CCAGAGGAGGAGGAAGGCGGCTGCGAACTGCGCGTGAAATTCAGCCGC |
| | | AGCGCAGATGCTCCAGCCTACAAGCAGGGGCAGAACCAGCTCTACAAC |
| | | GAACTCAATCTTGGTCGGAGAGAGGAGTACGACGTGCTGGACAAGCGG |
| | | AGAGGACGGGACCCAGAAATGGGCGGGAAGCCGCGCAGAAAGAATCCC |
| | | CAAGAGGGCCTGTACAACGAGCTCCAAAAGGATAAGATGGCAGAAGCC |
| | | TATAGCGAGATTGGTATGAAAGGGGAACGCAGAAGAGGCAAAGGCCAC |
| | | GACGGACTGTACCAGGGACTCAGCACCGCCACCAAGGACACCTATGAC |
| | | GCTCTTCACATGCAGGCCCTGCCGCCTCGG |

139102

| | | |
|---|---|---|
| 139102-aa | 1003 | QVQLVQSGAEVKKPGASVKVSCKASGYTFSNYGITWVRQAPGQGLEWM |
| ScFv domain | | GWISAYNGNTNYAQKFQGRVTMTRNTSISTAYMELSSLRSEDTAVYYC |
| | | ARGPYYYYMDVWGKGTMVTVSSASGGGGSGGRASGGGGSEIVMTQSPL |
| | | SLPVTPGEPASISCRSSQSLLYSNGYNYVDWYLQKPGQSPQLLIYLGS |
| | | NRASGVPDRFSGSGSGTDFKLQISRVEAEDVGIYYCMQGRQFPYSFGQ |
| | | GTKVEIK |
| 139102-nt | 1004 | CAAGTCCAACTGGTCCAGAGCGGTGCAGAAGTGAAGAAGCCCGGAGCG |
| ScFv domain | | AGCGTGAAAGTGTCCTGCAAGGCTTCCGGGTACACCTTCTCCAACTAC |
| | | GGCATCACTTGGGTGCGCCAGGCCCCGGGACAGGGCCTGGAATGGATG |
| | | GGGTGGATTTCCGCGTACAACGGCAATACGAACTACGCTCAGAAGTTC |
| | | CAGGGTAGAGTGACCATGACTAGGAACACCTCCATTTCCACCGCCTAC |
| | | ATGGAACTGTCCTCCCTGCGGAGCGAGGACACCGCCGTGTACTATTGC |
| | | GCCCGGGGACCATACTACTACTACATGGATGTCTGGGGGAAGGGGACT |
| | | ATGGTCACCGTGTCATCCGCCTCGGGAGGCGGCGGATCAGGAGGACGC |
| | | GCCTCTGGTGGTGGAGGATCGGAGATCGTGATGACCCAGAGCCCTCTC |
| | | TCCTTGCCCGTGACTCCTGGGGAGCCCGCATCCATTTCATGCCGGAGC |
| | | TCCCAGTCACTTCTCTACTCCAACGGCTATAACTACGTGGATTGGTAC |
| | | CTCCAAAAGCCGGGCCAGAGCCCGCAGCTGCTGATCTACCTGGGCTCG |
| | | AACAGGGCCAGCGGAGTGCCTGACCGGTTCTCCGGGTCGGGAAGCGGG |
| | | ACCGACTTCAAGCTGCAAATCTCGAGAGTGGAGGCCGAGGACGTGGGA |
| | | ATCTACTACTGTATGCAGGGCCGCCAGTTTCCGTACTCGTTCGGACAG |
| | | GGCACCAAAGTGGAAATCAAG |
| 139102-aa | 1005 | QVQLVQSGAEVKKPGASVKVSCKASGYTFSNYGITWVRQAPGQGLEWM |
| VH | | GWISAYNGNTNYAQKFQGRVTMTRNTSISTAYMELSSLRSEDTAVYYC |
| | | ARGPYYYYMDVWGKGTMVTVSS |
| 139102-aa | 1006 | EIVMTQSPLSLPVTPGEPASISCRSSQSLLYSNGYNYVDWYLQKPGQS |
| VL | | PQLLIYLGSNRASGVPDRFSGSGSGTDFKLQISRVEAEDVGIYYCMQG |
| | | RQFPYSFGQGTKVEIK |
| 139102-aa | 1007 | MALPVTALLLPLALLLHAARPQVQLVQSGAEVKKPGASVKVSCKASGY |
| Full CAR | | TFSNYGITWVRQAPGQGLEWMGWISAYNGNTNYAQKFQGRVTMTRNTS |
| | | ISTAYMELSSLRSEDTAVYYCARGPYYYYMDVWGKGTMVTVSSASGGG |
| | | GSGGRASGGGGSEIVMTQSPLSLPVTPGEPASISCRSSQSLLYSNGYN |
| | | YVDWYLQKPGQSPQLLIYLGSNRASGVPDRFSGSGSGTDFKLQISRVE |
| | | AEDVGIYYCMQGRQFPYSFGQGTKVEIKTTTPAPRPPTPAPTIASQPL |
| | | SLRPEACRPAAGGAVHTRGLDFACDIYIWAPLAGTCGVLLLSLVITLY |
| | | CKRGRKKLLYIFKQPFMRPVQTTQEEDGCSCRFPEEEEGGCELRVKFS |
| | | RSADAPAYKQGQNQLYNELNLGRREEYDVLDKRRGRDPEMGGKPRRKN |
| | | PQEGLYNELQKDKMAEAYSEIGMKGERRRGKGHDGLYQGLSTATKDTY |
| | | DALHMQALPPR |
| 139102-nt | 1008 | ATGGCCCTCCCTGTCACCGCCCTGCTGCTTCCGCTGGCTCTTCTGCTC |
| Full CAR | | CACGCCGCTCGGCCCCAAGTCCAACTGGTCCAGAGCGGTGCAGAAGTG |
| | | AAGAAGCCCGGAGCGAGCGTGAAAGTGTCCTGCAAGGCTTCCGGGTAC |
| | | ACCTTCTCCAACTACGGCATCACTTGGGTGCGCCAGGCCCCGGGACAG |
| | | GGCCTGGAATGGATGGGGTGGATTTCCGCGTACAACGGCAATACGAAC |
| | | TACGCTCAGAAGTTCCAGGGTAGAGTGACCATGACTAGGAACACCTCC |
| | | ATTTCCACCGCCTACATGGAACTGTCCTCCCTGCGGAGCGAGGACACC |
| | | GCCGTGTACTATTGCGCCCGGGGACCATACTACTACTACATGGATGTC |
| | | TGGGGGAAGGGGACTATGGTCACCGTGTCATCCGCCTCGGGAGGCGGC |
| | | GGATCAGGAGGACGCGCCTCTGGTGGTGGAGGATCGGAGATCGTGATG |
| | | ACCCAGAGCCCTCTCTCCTTGCCCGTGACTCCTGGGGAGCCCGCATCC |
| | | ATTTCATGCCGGAGCTCCCAGTCACTTCTCTACTCCAACGGCTATAAC |
| | | TACGTGGATTGGTACCTCCAAAAGCCGGGCCAGAGCCCGCAGCTGCTG |
| | | ATCTACCTGGGCTCGAACAGGGCCAGCGGAGTGCCTGACCGGTTCTCC |
| | | GGGTCGGGAAGCGGGACCGACTTCAAGCTGCAAATCTCGAGAGTGGAG |
| | | GCCGAGGACGTGGGAATCTACTACTGTATGCAGGGCCGCCAGTTTCCG |
| | | TACTCGTTCGGACAGGGCACCAAAGTGGAAATCAAGACCACTACCCCA |
| | | GCACCGAGGCCACCCACCCCGGCTCCTACCATCGCCTCCCAGCCTCTG |
| | | TCCCTGCGTCCGGAGGCATGTAGACCCGCAGCTGGTGGGGCCGTGCAT |
| | | ACCCGGGGTCTTGACTTCGCCTGCGATATCTACATTTGGGCCCCTCTG |
| | | GCTGGTACTTGCGGGGTCCTGCTGCTTTCACTCGTGATCACTCTTTAC |
| | | TGTAAGCGCGGTCGGAAGAAGCTGCTGTACATCTTTAAGCAACCCTTC |
| | | ATGAGGCCTGTGCAGACTACTCAAGAGGAGGACGGCTGTTCATGCCGG |
| | | TTCCCAGAGGAGGAGGAAGGCGGCTGCGAACTGCGCGTGAAATTCAGC |
| | | CGCAGCGCAGATGCTCCAGCCTACAAGCAGGGGCAGAACCAGCTCTAC |
| | | AACGAACTCAATCTTGGTCGGAGAGAGGAGTACGACGTGCTGGACAAG |
| | | CGGAGAGGACGGGACCCAGAAATGGGCGGGAAGCCGCGCAGAAAGAAT |
| | | CCCCAAGAGGGCCTGTACAACGAGCTCCAAAAGGATAAGATGGCAGAA |
| | | GCCTATAGCGAGATTGGTATGAAAGGGGAACGCAGAAGAGGCAAAGGC |
| | | CACGACGGACTGTACCAGGGACTCAGCACCGCCACCAAGGACACCTAT |
| | | GACGCTCTTCACATGCAGGCCCTGCCGCCTCGG |

139104

| | | |
|---|---|---|
| 139104-aa | 1009 | EVQLLETGGGLVQPGGSLRLSCAVSGFALSNHGMSWVRRAPGKGLEWV |
| ScFv domain | | SGIVYSGSTYYAASVKGRFTISRDNSRNTLYLQMNSLRPEDTAIYYCS |
| | | AHGGESDVWGQGTTVTVSSASGGGGSGGRASGGGGSEIVLTQSPATLS |
| | | VSPGESATLSCRASQSVSSNLAWYQQKPGQAPRLLIYGASTRASGIPD |
| | | RFSGSGSGTDFTLTISSLQAEDVAVYYCQQYGSSLTFGGGTKVEIK |
| 139104-nt | 1010 | GAAGTGCAATTGCTCGAAACTGGAGGAGGTCTGGTGCAACCTGGAGGA |
| ScFv domain | | TCACTTCGCCTGTCCTGCGCCGTGTCGGGCTTTGCCCTGTCCAACCAT |
| | | GGAATGAGCTGGGTCCGCCGCGCGCCGGGGAAGGGCCTCGAATGGGTG |
| | | TCCGGCATCGTCTACTCCGGCTCCACCTACTACGCCGCGTCCGTGAAG |
| | | GGCCGGTTCACGATTTCACGGGACAACTCGCGGAACACCCTGTACCTC |
| | | CAAATGAATTCCCTTCGGCCGGAGGATACTGCCATCTACTACTGCTCC |
| | | GCCCACGGTGGCGAATCCGACGTCTGGGGCCAGGGAACCACCGTGACC |
| | | GTGTCCAGCGCGTCCGGGGGAGGAGGAAGCGGGGGTAGAGCATCGGGT |
| | | GGAGGCGGATCAGAGATCGTGCTGACCCAGTCCCCCGCCACCTTGAGC |
| | | GTGTCACCAGGAGAGTCCGCCACCCTGTCATGCCGCGCCAGCCAGTCC |
| | | GTGTCCTCCAACCTGGCTTGGTACCAGCAGAAGCCGGGGCAGGCCCCT |
| | | AGACTCCTGATCTATGGGGCGTCGACCCGGGCATCTGGAATTCCCGAT |
| | | AGGTTCAGCGGATCGGGCTCGGGCACTGACTTCACTCTGACCATCTCC |
| | | TCGCTGCAAGCCGAGGACGTGGCTGTGTACTACTGTCAGCAGTACGGA |
| | | AGCTCCCTGACTTTCGGTGGCGGGACCAAAGTCGAGATTAAG |
| 139104-aa | 1011 | EVQLLETGGGLVQPGGSLRLSCAVSGFALSNHGMSWVRRAPGKGLEWV |
| VH | | SGIVYSGSTYYAASVKGRFTISRDNSRNTLYLQMNSLRPEDTAIYYCS |
| | | AHGGESDVWGQGTTVTVSS |
| 139104-aa | 1012 | EIVLTQSPATLSVSPGESATLSCRASQSVSSNLAWYQQKPGQAPRLLI |
| VL | | YGASTRASGIPDRFSGSGSGTDFTLTISSLQAEDVAVYYCQQYGSSLT |
| | | FGGGTKVEIK |
| 139104-aa | 1013 | MALPVTALLLPLALLLHAARPEVQLLETGGGLVQPGGSLRLSCAVSGF |
| Full CAR | | ALSNHGMSWVRRAPGKGLEWVSGIVYSGSTYYAASVKGRFTISRDNSR |
| | | NTLYLQMNSLRPEDTAIYYCSAHGGESDVWGQGTTVTVSSASGGGGSG |
| | | GRASGGGGSEIVLTQSPATLSVSPGESATLSCRASQSVSSNLAWYQQK |
| | | PGQAPRLLIYGASTRASGIPDRFSGSGSGTDFTLTISSLQAEDVAVYY |
| | | CQQYGSSLTFGGGTKVEIKTTTPAPRPPTPAPTIASQPLSLRPEACRP |
| | | AAGGAVHTRGLDFACDIYIWAPLAGTCGVLLLSLVITLYCKRGRKKLL |
| | | YIFKQPFMRPVQTTQEEDGCSCRFPEEEEGGCELRVKFSRSADAPAYK |
| | | QGQNQLYNELNLGRREEYDVLDKRRGRDPEMGGKPRRKNPQEGLYNEL |
| | | QKDKMAEAYSEIGMKGERRRGKGHDGLYQGLSTATKDTYDALHMQALP |
| | | PR |
| 139104-nt | 1014 | ATGGCCCTCCCTGTCACCGCCCTGCTGCTTCCGCTGGCTCTTCTGCTC |
| Full CAR | | CACGCCGCTCGGCCCGAAGTGCAATTGCTCGAAACTGGAGGAGGTCTG |
| | | GTGCAACCTGGAGGATCACTTCGCCTGTCCTGCGCCGTGTCGGGCTTT |
| | | GCCCTGTCCAACCATGGAATGAGCTGGGTCCGCCGCGCGCCGGGGAAG |
| | | GGCCTCGAATGGGTGTCCGGCATCGTCTACTCCGGCTCCACCTACTAC |
| | | GCCGCGTCCGTGAAGGGCCGGTTCACGATTTCACGGGACAACTCGCGG |
| | | AACACCCTGTACCTCCAAATGAATTCCCTTCGGCCGGAGGATACTGCC |
| | | ATCTACTACTGCTCCGCCCACGGTGGCGAATCCGACGTCTGGGGCCAG |
| | | GGAACCACCGTGACCGTGTCCAGCGCGTCCGGGGGAGGAGGAAGCGGG |
| | | GGTAGAGCATCGGGTGGAGGCGGATCAGAGATCGTGCTGACCCAGTCC |
| | | CCCGCCACCTTGAGCGTGTCACCAGGAGAGTCCGCCACCCTGTCATGC |
| | | CGCGCCAGCCAGTCCGTGTCCTCCAACCTGGCTTGGTACCAGCAGAAG |
| | | CCGGGGCAGGCCCCTAGACTCCTGATCTATGGGGCGTCGACCCGGGCA |
| | | TCTGGAATTCCCGATAGGTTCAGCGGATCGGGCTCGGGCACTGACTTC |
| | | ACTCTGACCATCTCCTCGCTGCAAGCCGAGGACGTGGCTGTGTACTAC |
| | | TGTCAGCAGTACGGAAGCTCCCTGACTTTCGGTGGCGGGACCAAAGTC |
| | | GAGATTAAGACCACTACCCCAGCACCGAGGCCACCCACCCCGGCTCCT |
| | | ACCATCGCCTCCCAGCCTCTGTCCCTGCGTCCGGAGGCATGTAGACCC |
| | | GCAGCTGGTGGGGCCGTGCATACCCGGGGTCTTGACTTCGCCTGCGAT |
| | | ATCTACATTTGGGCCCCTCTGGCTGGTACTTGCGGGGTCCTGCTGCTT |
| | | TCACTCGTGATCACTCTTTACTGTAAGCGCGGTCGGAAGAAGCTGCTG |
| | | TACATCTTTAAGCAACCCTTCATGAGGCCTGTGCAGACTACTCAAGAG |
| | | GAGGACGGCTGTTCATGCCGGTTCCCAGAGGAGGAGGAAGGCGGCTGC |
| | | GAACTGCGCGTGAAATTCAGCCGCAGCGCAGATGCTCCAGCCTACAAG |
| | | CAGGGGCAGAACCAGCTCTACAACGAACTCAATCTTGGTCGGAGAGAG |
| | | GAGTACGACGTGCTGGACAAGCGGAGAGGACGGGACCCAGAAATGGGC |
| | | GGGAAGCCGCGCAGAAAGAATCCCCAAGAGGGCCTGTACAACGAGCTC |
| | | CAAAAGGATAAGATGGCAGAAGCCTATAGCGAGATTGGTATGAAAGGG |
| | | GAACGCAGAAGAGGCAAAGGCCACGACGGACTGTACCAGGGACTCAGC |
| | | ACCGCCACCAAGGACACCTATGACGCTCTTCACATGCAGGCCCTGCCG |
| | | CCTCGG |

139106

| | | |
|---|---|---|
| 139106-aa | 1015 | EVQLVETGGGLVQPGGSLRLSCAVSGFALSNHGMSWVRRAPGKGLEWV |
| ScFv domain | | SGIVYSGSTYYAASVKGRFTISRDNSRNTLYLQMNSLRPEDTAIYYCS |
| | | AHGGESDVWGQGTTVTVSSASGGGGSGGRASGGGGSEIVMTQSPATLS |
| | | VSPGERATLSCRASQSVSSKLAWYQQKPGQAPRLLMYGASIRATGIPD |
| | | RFSGSGSGTEFTLTISSLEPEDFAVYYCQQYGSSSWTFGQGTKVEIK |
| 139106-nt | 1016 | GAAGTGCAATTGGTGGAAACTGGAGGAGGACTTGTGCAACCTGGAGGA |
| ScFv domain | | TCATTGAGACTGAGCTGCGCAGTGTCGGGATTCGCCCTGAGCAACCAT |
| | | GGAATGTCCTGGGTCAGAAGGGCCCCTGGAAAAGGCCTCGAATGGGTG |
| | | TCAGGGATCGTGTACTCCGGTTCCACTTACTACGCCGCCTCCGTGAAG |
| | | GGGCGCTTCACTATCTCACGGGATAACTCCCGCAATACCCTGTACCTC |
| | | CAAATGAACAGCCTGCGGCCGGAGGATACCGCCATCTACTACTGTTCC |
| | | GCCCACGGTGGAGAGTCTGACGTCTGGGGCCAGGGAACTACCGTGACC |
| | | GTGTCCTCCGCGTCCGGCGGTGGAGGGAGCGGCGGCCGCGCCAGCGGC |
| | | GGCGGAGGCTCCGAGATCGTGATGACCCAGAGCCCCGCTACTCTGTCG |
| | | GTGTCGCCCGGAGAAAGGGCGACCCTGTCCTGCCGGGCGTCGCAGTCC |
| | | GTGAGCAGCAAGCTGGCTTGGTACCAGCAGAAGCCGGGCCAGGCACCA |
| | | CGCCTGCTTATGTACGGTGCCTCCATTCGGGCCACCGGAATCCCGGAC |
| | | CGGTTCTCGGGGTCGGGGTCCGGTACCGAGTTCACACTGACCATTTCC |
| | | TCGCTCGAGCCCGAGGACTTTGCCGTCTATTACTGCCAGCAGTACGGC |
| | | TCCTCCTCATGGACGTTCGGCCAGGGGACCAAGGTCGAAATCAAG |
| 139106-aa | 1017 | EVQLVETGGGLVQPGGSLRLSCAVSGFALSNHGMSWVRRAPGKGLEWV |
| VH | | SGIVYSGSTYYAASVKGRFTISRDNSRNTLYLQMNSLRPEDTAIYYCS |
| | | AHGGESDVWGQGTTVTVSS |
| 139106-aa | 1018 | EIVMTQSPATLSVSPGERATLSCRASQSVSSKLAWYQQKPGQAPRLLM |
| VL | | YGASIRATGIPDRFSGSGSGTEFTLTISSLEPEDFAVYYCQQYGSSSW |
| | | TFGQGTKVEIK |
| 139106-aa | 1019 | MALPVTALLLPLALLLHAARPEVQLVETGGGLVQPGGSLRLSCAVSGF |
| Full CAR | | ALSNHGMSWVRRAPGKGLEWVSGIVYSGSTYYAASVKGRFTISRDNSR |
| | | NTLYLQMNSLRPEDTAIYYCSAHGGESDVWGQGTTVTVSSASGGGGSG |
| | | GRASGGGGSEIVMTQSPATLSVSPGERATLSCRASQSVSSKLAWYQQK |
| | | PGQAPRLLMYGASIRATGIPDRFSGSGSGTEFTLTISSLEPEDFAVYY |
| | | CQQYGSSSWTFGQGTKVEIKTTTPAPRPPTPAPTIASQPLSLRPEACR |
| | | PAAGGAVHTRGLDFACDIYIWAPLAGTCGVLLLSLVITLYCKRGRKKL |
| | | LYIFKQPFMRPVQTTQEEDGCSCRFPEEEEGGCELRVKFSRSADAPAY |
| | | KQGQNQLYNELNLGRREEYDVLDKRRGRDPEMGGKPRRKNPQEGLYNE |
| | | LQKDKMAEAYSEIGMKGERRRGKGHDGLYQGLSTATKDTYDALHMQAL |
| | | PPR |
| 139106-nt | 1020 | ATGGCCCTCCCTGTCACCGCCCTGCTGCTTCCGCTGGCTCTTCTGCTC |
| Full CAR | | CACGCCGCTCGGCCCGAAGTGCAATTGGTGGAAACTGGAGGAGGACTT |
| | | GTGCAACCTGGAGGATCATTGAGACTGAGCTGCGCAGTGTCGGGATTC |
| | | GCCCTGAGCAACCATGGAATGTCCTGGGTCAGAAGGGCCCCTGGAAAA |
| | | GGCCTCGAATGGGTGTCAGGGATCGTGTACTCCGGTTCCACTTACTAC |
| | | GCCGCCTCCGTGAAGGGGCGCTTCACTATCTCACGGGATAACTCCCGC |
| | | AATACCCTGTACCTCCAAATGAACAGCCTGCGGCCGGAGGATACCGCC |
| | | ATCTACTACTGTTCCGCCCACGGTGGAGAGTCTGACGTCTGGGGCCAG |
| | | GGAACTACCGTGACCGTGTCCTCCGCGTCCGGCGGTGGAGGGAGCGGC |
| | | GGCCGCGCCAGCGGCGGCGGAGGCTCCGAGATCGTGATGACCCAGAGC |
| | | CCCGCTACTCTGTCGGTGTCGCCCGGAGAAAGGGCGACCCTGTCCTGC |
| | | CGGGCGTCGCAGTCCGTGAGCAGCAAGCTGGCTTGGTACCAGCAGAAG |
| | | CCGGGCCAGGCACCACGCCTGCTTATGTACGGTGCCTCCATTCGGGCC |
| | | ACCGGAATCCCGGACCGGTTCTCGGGGTCGGGGTCCGGTACCGAGTTC |
| | | ACACTGACCATTTCCTCGCTCGAGCCCGAGGACTTTGCCGTCTATTAC |
| | | TGCCAGCAGTACGGCTCCTCCTCATGGACGTTCGGCCAGGGGACCAAG |
| | | GTCGAAATCAAGACCACTACCCCAGCACCGAGGCCACCCACCCCGGCT |
| | | CCTACCATCGCCTCCCAGCCTCTGTCCCTGCGTCCGGAGGCATGTAGA |
| | | CCCGCAGCTGGTGGGGCCGTGCATACCCGGGGTCTTGACTTCGCCTGC |
| | | GATATCTACATTTGGGCCCCTCTGGCTGGTACTTGCGGGGTCCTGCTG |
| | | CTTTCACTCGTGATCACTCTTTACTGTAAGCGCGGTCGGAAGAAGCTG |
| | | CTGTACATCTTTAAGCAACCCTTCATGAGGCCTGTGCAGACTACTCAA |
| | | GAGGAGGACGGCTGTTCATGCCGGTTCCCAGAGGAGGAGGAAGGCGGC |
| | | TGCGAACTGCGCGTGAAATTCAGCCGCAGCGCAGATGCTCCAGCCTAC |
| | | AAGCAGGGGCAGAACCAGCTCTACAACGAACTCAATCTTGGTCGGAGA |
| | | GAGGAGTACGACGTGCTGGACAAGCGGAGAGGACGGGACCCAGAAATG |
| | | GGCGGGAAGCCGCGCAGAAAGAATCCCCAAGAGGGCCTGTACAACGAG |
| | | CTCCAAAAGGATAAGATGGCAGAAGCCTATAGCGAGATTGGTATGAAA |
| | | GGGGAACGCAGAAGAGGCAAAGGCCACGACGGACTGTACCAGGGACTC |
| | | AGCACCGCCACCAAGGACACCTATGACGCTCTTCACATGCAGGCCCTG |
| | | CCGCCTCGG |

139107

| | | |
|---|---|---|
| 139107-aa | 1021 | EVQLVETGGGVVQPGGSLRLSCAVSGFALSNHGMSWVRRAPGKGLEWV |
| ScFv domain | | SGIVYSGSTYYAASVKGRFTISRDNSRNTLYLQMNSLRPEDTAIYYCS |
| | | AHGGESDVWGQGTTVTVSSASGGGGSGGRASGGGGSEIVLTQSPGTLS |
| | | LSPGERATLSCRASQSVGSTNLAWYQQKPGQAPRLLIYDASNRATGIP |
| | | DRFSGGGSGTDFTLTISRLEPEDFAVYYCQQYGSSPPWTFGQGTKVEI |
| | | K |
| 139107-nt | 1022 | GAAGTGCAATTGGTGGAGACTGGAGGAGGAGTGGTGCAACCTGGAGGA |
| ScFv domain | | AGCCTGAGACTGTCATGCGCGGTGTCGGGCTTCGCCCTCTCCAACCAC |
| | | GGAATGTCCTGGGTCCGCCGGGCCCCTGGGAAAGGACTTGAATGGGTG |
| | | TCCGGCATCGTGTACTCGGGTTCCACCTACTACGCGGCCTCAGTGAAG |
| | | GGCCGGTTTACTATTAGCCGCGACAACTCCAGAAACACACTGTACCTC |
| | | CAAATGAACTCGCTGCGGCCGGAAGATACCGCTATCTACTACTGCTCC |
| | | GCCCATGGGGGAGAGTCGGACGTCTGGGGACAGGGCACCACTGTCACT |
| | | GTGTCCAGCGCTTCCGGCGGTGGTGGAAGCGGGGGACGGGCCTCAGGA |
| | | GGCGGTGGCAGCGAGATTGTGCTGACCCAGTCCCCCGGGACCCTGAGC |
| | | CTGTCCCCGGGAGAAAGGGCCACCCTCTCCTGTCGGGCATCCCAGTCC |
| | | GTGGGGTCTACTAACCTTGCATGGTACCAGCAGAAGCCCGGCCAGGCC |
| | | CCTCGCCTGCTGATCTACGACGCGTCCAATAGAGCCACCGGCATCCCG |
| | | GATCGCTTCAGCGGAGGCGGATCGGGCACCGACTTCACCCTCACCATT |
| | | TCAAGGCTGGAACCGGAGGACTTCGCCGTGTACTACTGCCAGCAGTAT |
| | | GGTTCGTCCCCACCCTGGACGTTCGGCCAGGGGACTAAGGTCGAGATC |
| | | AAG |
| 139107-aa | 1023 | EVQLVETGGGVVQPGGSLRLSCAVSGFALSNHGMSWVRRAPGKGLEWV |
| VH | | SGIVYSGSTYYAASVKGRFTISRDNSRNTLYLQMNSLRPEDTAIYYCS |
| | | AHGGESDVWGQGTTVTVSS |
| 139107-aa | 1024 | EIVLTQSPGTLSLSPGERATLSCRASQSVGSTNLAWYQQKPGQAPRLL |
| VL | | IYDASNRATGIPDRFSGGGSGTDFTLTISRLEPEDFAVYYCQQYGSSP |
| | | PWTFGQGTKVEIK |
| 139107-aa | 1025 | MALPVTALLLPLALLLHAARPEVQLVETGGGVVQPGGSLRLSCAVSGF |
| Full CAR | | ALSNHGMSWVRRAPGKGLEWVSGIVYSGSTYYAASVKGRFTISRDNSR |
| | | NTLYLQMNSLRPEDTAIYYCSAHGGESDVWGQGTTVTVSSASGGGGSG |
| | | GRASGGGGSEIVLTQSPGTLSLSPGERATLSCRASQSVGSTNLAWYQQ |
| | | KPGQAPRLLIYDASNRATGIPDRFSGGGSGTDFTLTISRLEPEDFAVY |
| | | YCQQYGSSPPWTFGQGTKVEIKTTTPAPRPPTPAPTIASQPLSLRPEA |
| | | CRPAAGGAVHTRGLDFACDIYIWAPLAGTCGVLLLSLVITLYCKRGRK |
| | | KLLYIFKQPFMRPVQTTQEEDGCSCRFPEEEEGGCELRVKFSRSADAP |
| | | AYKQGQNQLYNELNLGRREEYDVLDKRRGRDPEMGGKPRRKNPQEGLY |
| | | NELQKDKMAEAYSEIGMKGERRRGKGHDGLYQGLSTATKDTYDALHMQ |
| | | ALPPR |
| 139107-nt | 1026 | ATGGCCCTCCCTGTCACCGCCCTGCTGCTTCCGCTGGCTCTTCTGCTC |
| Full CAR | | CACGCCGCTCGGCCCGAAGTGCAATTGGTGGAGACTGGAGGAGGAGTG |
| | | GTGCAACCTGGAGGAAGCCTGAGACTGTCATGCGCGGTGTCGGGCTTC |
| | | GCCCTCTCCAACCACGGAATGTCCTGGGTCCGCCGGGCCCCTGGGAAA |
| | | GGACTTGAATGGGTGTCCGGCATCGTGTACTCGGGTTCCACCTACTAC |
| | | GCGGCCTCAGTGAAGGGCCGGTTTACTATTAGCCGCGACAACTCCAGA |
| | | AACACACTGTACCTCCAAATGAACTCGCTGCGGCCGGAAGATACCGCT |
| | | ATCTACTACTGCTCCGCCCATGGGGGAGAGTCGGACGTCTGGGGACAG |
| | | GGCACCACTGTCACTGTGTCCAGCGCTTCCGGCGGTGGTGGAAGCGGG |
| | | GGACGGGCCTCAGGAGGCGGTGGCAGCGAGATTGTGCTGACCCAGTCC |
| | | CCCGGGACCCTGAGCCTGTCCCCGGGAGAAAGGGCCACCCTCTCCTGT |
| | | CGGGCATCCCAGTCCGTGGGGTCTACTAACCTTGCATGGTACCAGCAG |
| | | AAGCCCGGCCAGGCCCCTCGCCTGCTGATCTACGACGCGTCCAATAGA |
| | | GCCACCGGCATCCCGGATCGCTTCAGCGGAGGCGGATCGGGCACCGAC |
| | | TTCACCCTCACCATTTCAAGGCTGGAACCGGAGGACTTCGCCGTGTAC |
| | | TACTGCCAGCAGTATGGTTCGTCCCCACCCTGGACGTTCGGCCAGGGG |
| | | ACTAAGGTCGAGATCAAGACCACTACCCCAGCACCGAGGCCACCCACC |
| | | CCGGCTCCTACCATCGCCTCCCAGCCTCTGTCCCTGCGTCCGGAGGCA |
| | | TGTAGACCCGCAGCTGGTGGGGCCGTGCATACCCGGGGTCTTGACTTC |
| | | GCCTGCGATATCTACATTTGGGCCCCTCTGGCTGGTACTTGCGGGGTC |
| | | CTGCTGCTTTCACTCGTGATCACTCTTTACTGTAAGCGCGGTCGGAAG |
| | | AAGCTGCTGTACATCTTTAAGCAACCCTTCATGAGGCCTGTGCAGACT |
| | | ACTCAAGAGGAGGACGGCTGTTCATGCCGGTTCCCAGAGGAGGAGGAA |
| | | GGCGGCTGCGAACTGCGCGTGAAATTCAGCCGCAGCGCAGATGCTCCA |
| | | GCCTACAAGCAGGGGCAGAACCAGCTCTACAACGAACTCAATCTTGGT |
| | | CGGAGAGAGGAGTACGACGTGCTGGACAAGCGGAGAGGACGGGACCCA |
| | | GAAATGGGCGGGAAGCCGCGCAGAAAGAATCCCCAAGAGGGCCTGTAC |
| | | AACGAGCTCCAAAAGGATAAGATGGCAGAAGCCTATAGCGAGATTGGT |
| | | ATGAAAGGGGAACGCAGAAGAGGCAAAGGCCACGACGGACTGTACCAG |
| | | GGACTCAGCACCGCCACCAAGGACACCTATGACGCTCTTCACATGCAG |
| | | GCCCTGCCGCCTCGG |

139108

| | | |
|---|---|---|
| 139108-aa | 1027 | QVQLVESGGGLVKPGGSLRLSCAASGFTFSDYYMSWIRQAPGKGLEWV |
| ScFv domain | | SYISSSGSTIYYADSVKGRFTISRDNAKNSLYLQMNSLRAEDTAVYYC |
| | | ARESGDGMDVWGQGTTVTVSSASGGGGSGGRASGGGGSDIQMTQSPSS |
| | | LSASVGDRVTITCRASQSISSYLNWYQQKPGKAPKLLIYAASSLQSGV |
| | | PSRFSGSGSGTDFTLTISSLQPEDFATYYCQQSYTLAFGQGTKVDIK |
| 139108-nt | 1028 | CAAGTGCAACTCGTGGAATCTGGTGGAGGACTCGTGAAACCTGGAGGA |
| ScFv domain | | TCATTGAGACTGTCATGCGCGGCCTCGGGATTCACGTTCTCCGATTAC |
| | | TACATGAGCTGGATTCGCCAGGCTCCGGGGAAGGGACTGGAATGGGTG |
| | | TCCTACATTTCCTCATCCGGCTCCACCATCTACTACGCGGACTCCGTG |
| | | AAGGGGAGATTCACCATTAGCCGCGATAACGCCAAGAACAGCCTGTAC |
| | | CTTCAGATGAACTCCCTGCGGGCTGAAGATACTGCCGTCTACTACTGC |
| | | GCAAGGGAGAGCGGAGATGGGATGGACGTCTGGGGACAGGGTACCACT |
| | | GTGACCGTGTCGTCGGCCTCCGGCGGAGGGGGTTCGGGTGGAAGGGCC |
| | | AGCGGCGGCGGAGGCAGCGACATCCAGATGACCCAGTCCCCCTCATCG |
| | | CTGTCCGCCTCCGTGGGCGACCGCGTCACCATCACATGCCGGGCCTCA |
| | | CAGTCGATCTCCTCCTACCTCAATTGGTATCAGCAGAAGCCCGGAAAG |
| | | GCCCCTAAGCTTCTGATCTACGCAGCGTCCTCCCTGCAATCCGGGGTC |
| | | CCATCTCGGTTCTCCGGCTCGGGCAGCGGTACCGACTTCACTCTGACC |
| | | ATCTCGAGCCTGCAGCCGGAGGACTTCGCCACTTACTACTGTCAGCAA |
| | | AGCTACACCCTCGCGTTTGGCCAGGGCACCAAAGTGGACATCAAG |
| 139108-aa | 1029 | QVQLVESGGGLVKPGGSLRLSCAASGFTFSDYYMSWIRQAPGKGLEWV |
| VH | | SYISSSGSTIYYADSVKGRFTISRDNAKNSLYLQMNSLRAEDTAVYYC |
| | | ARESGDGMDVWGQGTTVTVSS |
| 139108-aa | 1030 | DIQMTQSPSSLSASVGDRVTITCRASQSISSYLNWYQQKPGKAPKLLI |
| VL | | YAASSLQSGVPSRFSGSGSGTDFTLTISSLQPEDFATYYCQQSYTLAF |
| | | GQGTKVDIK |
| 139108-aa | 1031 | MALPVTALLLPLALLLHAARPQVQLVESGGGLVKPGGSLRLSCAASGF |
| Full CAR | | TFSDYYMSWIRQAPGKGLEWVSYISSSGSTIYYADSVKGRFTISRDNA |
| | | KNSLYLQMNSLRAEDTAVYYCARESGDGMDVWGQGTTVTVSSASGGGG |
| | | SGGRASGGGGSDIQMTQSPSSLSASVGDRVTITCRASQSISSYLNWYQ |
| | | QKPGKAPKLLIYAASSLQSGVPSRFSGSGSGTDFTLTISSLQPEDFAT |
| | | YYCQQSYTLAFGQGTKVDIKTTTPAPRPPTPAPTIASQPLSLRPEACR |
| | | PAAGGAVHTRGLDFACDIYIWAPLAGTCGVLLLSLVITLYCKRGRKKL |
| | | LYIFKQPFMRPVQTTQEEDGCSCRFPEEEEGGCELRVKFSRSADAPAY |
| | | KQGQNQLYNELNLGRREEYDVLDKRRGRDPEMGGKPRRKNPQEGLYNE |
| | | LQKDKMAEAYSEIGMKGERRRGKGHDGLYQGLSTATKDTYDALHMQAL |
| | | PPR |
| 139108-nt | 1032 | ATGGCCCTCCCTGTCACCGCCCTGCTGCTTCCGCTGGCTCTTCTGCTC |
| Full CAR | | CACGCCGCTCGGCCCCAAGTGCAACTCGTGGAATCTGGTGGAGGACTC |
| | | GTGAAACCTGGAGGATCATTGAGACTGTCATGCGCGGCCTCGGGATTC |
| | | ACGTTCTCCGATTACTACATGAGCTGGATTCGCCAGGCTCCGGGGAAG |
| | | GGACTGGAATGGGTGTCCTACATTTCCTCATCCGGCTCCACCATCTAC |
| | | TACGCGGACTCCGTGAAGGGGAGATTCACCATTAGCCGCGATAACGCC |
| | | AAGAACAGCCTGTACCTTCAGATGAACTCCCTGCGGGCTGAAGATACT |
| | | GCCGTCTACTACTGCGCAAGGGAGAGCGGAGATGGGATGGACGTCTGG |
| | | GGACAGGGTACCACTGTGACCGTGTCGTCGGCCTCCGGCGGAGGGGGT |
| | | TCGGGTGGAAGGGCCAGCGGCGGCGGAGGCAGCGACATCCAGATGACC |
| | | CAGTCCCCCTCATCGCTGTCCGCCTCCGTGGGCGACCGCGTCACCATC |
| | | ACATGCCGGGCCTCACAGTCGATCTCCTCCTACCTCAATTGGTATCAG |
| | | CAGAAGCCCGGAAAGGCCCCTAAGCTTCTGATCTACGCAGCGTCCTCC |
| | | CTGCAATCCGGGGTCCCATCTCGGTTCTCCGGCTCGGGCAGCGGTACC |
| | | GACTTCACTCTGACCATCTCGAGCCTGCAGCCGGAGGACTTCGCCACT |
| | | TACTACTGTCAGCAAAGCTACACCCTCGCGTTTGGCCAGGGCACCAAA |
| | | GTGGACATCAAGACCACTACCCCAGCACCGAGGCCACCCACCCCGGCT |
| | | CCTACCATCGCCTCCCAGCCTCTGTCCCTGCGTCCGGAGGCATGTAGA |
| | | CCCGCAGCTGGTGGGGCCGTGCATACCCGGGGTCTTGACTTCGCCTGC |
| | | GATATCTACATTTGGGCCCCTCTGGCTGGTACTTGCGGGGTCCTGCTG |
| | | CTTTCACTCGTGATCACTCTTTACTGTAAGCGCGGTCGGAAGAAGCTG |
| | | CTGTACATCTTTAAGCAACCCTTCATGAGGCCTGTGCAGACTACTCAA |
| | | GAGGAGGACGGCTGTTCATGCCGGTTCCCAGAGGAGGAGGAAGGCGGC |
| | | TGCGAACTGCGCGTGAAATTCAGCCGCAGCGCAGATGCTCCAGCCTAC |
| | | AAGCAGGGGCAGAACCAGCTCTACAACGAACTCAATCTTGGTCGGAGA |
| | | GAGGAGTACGACGTGCTGGACAAGCGGAGAGGACGGGACCCAGAAATG |
| | | GGCGGGAAGCCGCGCAGAAAGAATCCCCAAGAGGGCCTGTACAACGAG |
| | | CTCCAAAAGGATAAGATGGCAGAAGCCTATAGCGAGATTGGTATGAAA |
| | | GGGGAACGCAGAAGAGGCAAAGGCCACGACGGACTGTACCAGGGACTC |
| | | AGCACCGCCACCAAGGACACCTATGACGCTCTTCACATGCAGGCCCTG |
| | | CCGCCTCGG |

139110

| | | |
|---|---|---|
| 139110-aa | 1033 | QVQLVQSGGGLVKPGGSLRLSCAASGFTFSDYYMSWIRQAPGKGLEWV |
| ScFv domain | | SYISSSGNTIYYADSVKGRFTISRDNAKNSLYLQMNSLRAEDTAVYYC |
| | | ARSTMVREDYWGQGTLVTVSSASGGGGSGGRASGGGGSDIVLTQSPLS |
| | | LPVTLGQPASISCKSSESLVHNSGKTYLNWFHQRPGQSPRRLIYEVSN |
| | | RDSGVPDRFTGSGSGTDFTLKISRVEAEDVGVYYCMQGTHWPGTFGQG |
| | | TKLEIK |
| 139110-nt | 1034 | CAAGTGCAACTGGTGCAAAGCGGAGGAGGATTGGTCAAACCCGGAGGA |
| ScFv domain | | AGCCTGAGACTGTCATGCGCGGCCTCTGGATTCACCTTCTCCGATTAC |
| | | TACATGTCATGGATCAGACAGGCCCCGGGGAAGGGCCTCGAATGGGTG |
| | | TCCTACATCTCGTCCTCCGGGAACACCATCTACTACGCCGACAGCGTG |
| | | AAGGGCCGCTTTACCATTTCCCGCGACAACGCAAAGAACTCGCTGTAC |
| | | CTTCAGATGAATTCCCTGCGGGCTGAAGATACCGCGGTGTACTATTGC |
| | | GCCCGGTCCACTATGGTCCGGGAGGACTACTGGGGACAGGGCACACTC |
| | | GTGACCGTGTCCAGCGCGAGCGGGGGTGGAGGCAGCGGTGGACGCGCC |
| | | TCCGGCGGCGGCGGTTCAGACATCGTGCTGACTCAGTCGCCCCTGTCG |
| | | CTGCCGGTCACCCTGGGCCAACCGGCCTCAATTAGCTGCAAGTCCTCG |
| | | GAGAGCCTGGTGCACAACTCAGGAAAGACTTACCTGAACTGGTTCCAT |
| | | CAGCGGCCTGGACAGTCCCCACGGAGGCTCATCTATGAAGTGTCCAAC |
| | | AGGGATTCGGGGGTGCCCGACCGCTTCACTGGCTCCGGGTCCGGCACC |
| | | GACTTCACCTTGAAAATCTCCAGAGTGGAAGCCGAGGACGTGGGCGTG |
| | | TACTACTGTATGCAGGGTACCCACTGGCCTGGAACCTTTGGACAAGGA |
| | | ACTAAGCTCGAGATTAAG |
| 139110-aa | 1035 | QVQLVQSGGGLVKPGGSLRLSCAASGFTFSDYYMSWIRQAPGKGLEWV |
| VH | | SYISSSGNTIYYADSVKGRFTISRDNAKNSLYLQMNSLRAEDTAVYYC |
| | | ARSTMVREDYWGQGTLVTVSS |
| 139110-aa | 1036 | DIVLTQSPLSLPVTLGQPASISCKSSESLVHNSGKTYLNWFHQRPGQS |
| VL | | PRRLIYEVSNRDSGVPDRFTGSGSGTDFTLKISRVEAEDVGVYYCMQG |
| | | THWPGTFGQGTKLEIK |
| 139110-aa | 1037 | MALPVTALLLPLALLLHAARPQVQLVQSGGGLVKPGGSLRLSCAASGF |
| Full CAR | | TFSDYYMSWIRQAPGKGLEWVSYISSSGNTIYYADSVKGRFTISRDNA |
| | | KNSLYLQMNSLRAEDTAVYYCARSTMVREDYWGQGTLVTVSSASGGGG |
| | | SGGRASGGGGSDIVLTQSPLSLPVTLGQPASISCKSSESLVHNSGKTY |
| | | LNWFHQRPGQSPRRLIYEVSNRDSGVPDRFTGSGSGTDFTLKISRVEA |
| | | EDVGVYYCMQGTHWPGTFGQGTKLEIKTTTPAPRPPTPAPTIASQPLS |
| | | LRPEACRPAAGGAVHTRGLDFACDIYIWAPLAGTCGVLLLSLVITLYC |
| | | KRGRKKLLYIFKQPFMRPVQTTQEEDGCSCRFPEEEEGGCELRVKFSR |
| | | SADAPAYKQGQNQLYNELNLGRREEYDVLDKRRGRDPEMGGKPRRKNP |
| | | QEGLYNELQKDKMAEAYSEIGMKGERRRGKGHDGLYQGLSTATKDTYD |
| | | ALHMQALPPR |
| 139110-nt | 1038 | ATGGCCCTCCCTGTCACCGCCCTGCTGCTTCCGCTGGCTCTTCTGCTC |
| Full CAR | | CACGCCGCTCGGCCCCAAGTGCAACTGGTGCAAAGCGGAGGAGGATTG |
| | | GTCAAACCCGGAGGAAGCCTGAGACTGTCATGCGCGGCCTCTGGATTC |
| | | ACCTTCTCCGATTACTACATGTCATGGATCAGACAGGCCCCGGGGAAG |
| | | GGCCTCGAATGGGTGTCCTACATCTCGTCCTCCGGGAACACCATCTAC |
| | | TACGCCGACAGCGTGAAGGGCCGCTTTACCATTTCCCGCGACAACGCA |
| | | AAGAACTCGCTGTACCTTCAGATGAATTCCCTGCGGGCTGAAGATACC |
| | | GCGGTGTACTATTGCGCCCGGTCCACTATGGTCCGGGAGGACTACTGG |
| | | GGACAGGGCACACTCGTGACCGTGTCCAGCGCGAGCGGGGGTGGAGGC |
| | | AGCGGTGGACGCGCCTCCGGCGGCGGCGGTTCAGACATCGTGCTGACT |
| | | CAGTCGCCCCTGTCGCTGCCGGTCACCCTGGGCCAACCGGCCTCAATT |
| | | AGCTGCAAGTCCTCGGAGAGCCTGGTGCACAACTCAGGAAAGACTTAC |
| | | CTGAACTGGTTCCATCAGCGGCCTGGACAGTCCCCACGGAGGCTCATC |
| | | TATGAAGTGTCCAACAGGGATTCGGGGGTGCCCGACCGCTTCACTGGC |
| | | TCCGGGTCCGGCACCGACTTCACCTTGAAAATCTCCAGAGTGGAAGCC |
| | | GAGGACGTGGGCGTGTACTACTGTATGCAGGGTACCCACTGGCCTGGA |
| | | ACCTTTGGACAAGGAACTAAGCTCGAGATTAAGACCACTACCCCAGCA |
| | | CCGAGGCCACCCACCCCGGCTCCTACCATCGCCTCCCAGCCTCTGTCC |
| | | CTGCGTCCGGAGGCATGTAGACCCGCAGCTGGTGGGGCCGTGCATACC |
| | | CGGGGTCTTGACTTCGCCTGCGATATCTACATTTGGGCCCCTCTGGCT |
| | | GGTACTTGCGGGGTCCTGCTGCTTTCACTCGTGATCACTCTTTACTGT |
| | | AAGCGCGGTCGGAAGAAGCTGCTGTACATCTTTAAGCAACCCTTCATG |
| | | AGGCCTGTGCAGACTACTCAAGAGGAGGACGGCTGTTCATGCCGGTTC |
| | | CCAGAGGAGGAGGAAGGCGGCTGCGAACTGCGCGTGAAATTCAGCCGC |
| | | AGCGCAGATGCTCCAGCCTACAAGCAGGGGCAGAACCAGCTCTACAAC |
| | | GAACTCAATCTTGGTCGGAGAGAGGAGTACGACGTGCTGGACAAGCGG |
| | | AGAGGACGGGACCCAGAAATGGGCGGGAAGCCGCGCAGAAAGAATCCC |
| | | CAAGAGGGCCTGTACAACGAGCTCCAAAAGGATAAGATGGCAGAAGCC |
| | | TATAGCGAGATTGGTATGAAAGGGGAACGCAGAAGAGGCAAAGGCCAC |
| | | GACGGACTGTACCAGGGACTCAGCACCGCCACCAAGGACACCTATGAC |
| | | GCTCTTCACATGCAGGCCCTGCCGCCTCGG |

139112

| | | |
|---|---|---|
| 139112-aa | 1039 | QVQLVESGGGLVQPGGSLRLSCAVSGFALSNHGMSWVRRAPGKGLEWV |
| ScFv domain | | SGIVYSGSTYYAASVKGRFTISRDNSRNTLYLQMNSLRPEDTAIYYCS |
| | | AHGGESDVWGQGTTVTVSSASGGGGSGGRASGGGGSDIRLTQSPSPLS |
| | | ASVGDRVTITCQASEDINKFLNWYHQTPGKAPKLLIYDASTLQTGVPS |
| | | RFSGSGSGTDFTLTINSLQPEDIGTYYCQQYESLPLTFGGGTKVEIK |
| 139112-nt | 1040 | CAAGTGCAACTCGTGGAATCTGGTGGAGGACTCGTGCAACCCGGTGGA |
| ScFv domain | | AGCCTTAGGCTGTCGTGCGCCGTCAGCGGGTTTGCTCTGAGCAACCAT |
| | | GGAATGTCCTGGGTCCGCCGGGCACCGGGAAAAGGGCTGGAATGGGTG |
| | | TCCGGCATCGTGTACAGCGGGTCAACCTATTACGCCGCGTCCGTGAAG |
| | | GGCAGATTCACTATCTCAAGAGACAACAGCCGGAACACCCTGTACTTG |
| | | CAAATGAATTCCCTGCGCCCCGAGGACACCGCCATCTACTACTGCTCC |
| | | GCCCACGGAGGAGAGTCGGACGTGTGGGGCCAGGGAACGACTGTGACT |
| | | GTGTCCAGCGCATCAGGAGGGGGTGGTTCGGGCGGCCGGGCCTCGGGG |
| | | GGAGGAGGTTCCGACATTCGGCTGACCCAGTCCCCGTCCCCACTGTCG |
| | | GCCTCCGTCGGCGACCGCGTGACCATCACTTGTCAGGCGTCCGAGGAC |
| | | ATTAACAAGTTCCTGAACTGGTACCACCAGACCCCTGGAAAGGCCCCC |
| | | AAGCTGCTGATCTACGATGCCTCGACCCTTCAAACTGGAGTGCCTAGC |
| | | CGGTTCTCCGGGTCCGGCTCCGGCACTGATTTCACTCTGACCATCAAC |
| | | TCATTGCAGCCGGAAGATATCGGGACCTACTATTGCCAGCAGTACGAA |
| | | TCCCTCCCGCTCACATTCGGCGGGGGAACCAAGGTCGAGATTAAG |
| 139112-aa | 1041 | QVQLVESGGGLVQPGGSLRLSCAVSGFALSNHGMSWVRRAPGKGLEWV |
| VH | | SGIVYSGSTYYAASVKGRFTISRDNSRNTLYLQMNSLRPEDTAIYYCS |
| | | AHGGESDVWGQGTTVTVSS |
| 139112-aa | 1042 | DIRLTQSPSPLSASVGDRVTITCQASEDINKFLNWYHQTPGKAPKLLI |
| VL | | YDASTLQTGVPSRFSGSGSGTDFTLTINSLQPEDIGTYYCQQYESLPL |
| | | TFGGGTKVEIK |
| 139112-aa | 1043 | MALPVTALLLPLALLLHAARPQVQLVESGGGLVQPGGSLRLSCAVSGF |
| Full CAR | | ALSNHGMSWVRRAPGKGLEWVSGLVYSGSTYYAASVKGRFTISRDNSR |
| | | NTLYLQMNSLRPEDTAIYYCSAHGGESDVWGQGTTVTVSSASGGGGSG |
| | | GRASGGGGSDIRLTQSPSPLSASVGDRVTITCQASEDINKFLNWYHQT |
| | | PGKAPKLLIYDASTLQTGVPSRFSGSGSGTDFTLTINSLQPEDIGTYY |
| | | CQQYESLPLTFGGGTKVEIKTTTPAPRPPTPAPTIASQPLSLRPEACR |
| | | PAAGGAVHTRGLDFACDIYIWAPLAGTCGVLLLSLVITLYCKRGRKKL |
| | | LYIFKQPFMRPVQTTQEEDGCSCRFPEEEEGGCELRVKFSRSADAPAY |
| | | KQGQNQLYNELNLGRREEYDVLDKRRGRDPEMGGKPRRKNPQEGLYNE |
| | | LQKDKMAEAYSEIGMKGERRRGKGHDGLYQGLSTATKDTYDALHMQAL |
| | | PPR |
| 139112-nt | 1044 | ATGGCCCTCCCTGTCACCGCCCTGCTGCTTCCGCTGGCTCTTCTGCTC |
| Full CAR | | CACGCCGCTCGGCCCCAAGTGCAACTCGTGGAATCTGGTGGAGGACTC |
| | | GTGCAACCCGGTGGAAGCCTTAGGCTGTCGTGCGCCGTCAGCGGGTTT |
| | | GCTCTGAGCAACCATGGAATGTCCTGGGTCCGCCGGGCACCGGGAAAA |
| | | GGGCTGGAATGGGTGTCCGGCATCGTGTACAGCGGGTCAACCTATTAC |
| | | GCCGCGTCCGTGAAGGGCAGATTCACTATCTCAAGAGACAACAGCCGG |
| | | AACACCCTGTACTTGCAAATGAATTCCCTGCGCCCCGAGGACACCGCC |
| | | ATCTACTACTGCTCCGCCCACGGAGGAGAGTCGGACGTGTGGGGCCAG |
| | | GGAACGACTGTGACTGTGTCCAGCGCATCAGGAGGGGGTGGTTCGGGC |
| | | GGCCGGGCCTCGGGGGGAGGAGGTTCCGACATTCGGCTGACCCAGTCC |
| | | CCGTCCCCACTGTCGGCCTCCGTCGGCGACCGCGTGACCATCACTTGT |
| | | CAGGCGTCCGAGGACATTAACAAGTTCCTGAACTGGTACCACCAGACC |
| | | CCTGGAAAGGCCCCCAAGCTGCTGATCTACGATGCCTCGACCCTTCAA |
| | | ACTGGAGTGCCTAGCCGGTTCTCCGGGTCCGGCTCCGGCACTGATTTC |
| | | ACTCTGACCATCAACTCATTGCAGCCGGAAGATATCGGGACCTACTAT |
| | | TGCCAGCAGTACGAATCCCTCCCGCTCACATTCGGCGGGGGAACCAAG |
| | | GTCGAGATTAAGACCACTACCCCAGCACCGAGGCCACCCACCCCGGCT |
| | | CCTACCATCGCCTCCCAGCCTCTGTCCCTGCGTCCGGAGGCATGTAGA |
| | | CCCGCAGCTGGTGGGGCCGTGCATACCCGGGGTCTTGACTTCGCCTGC |
| | | GATATCTACATTTGGGCCCCTCTGGCTGGTACTTGCGGGGTCCTGCTG |
| | | CTTTCACTCGTGATCACTCTTTACTGTAAGCGCGGTCGGAAGAAGCTG |
| | | CTGTACATCTTTAAGCAACCCTTCATGAGGCCTGTGCAGACTACTCAA |
| | | GAGGAGGACGGCTGTTCATGCCGGTTCCCAGAGGAGGAGGAAGGCGGC |
| | | TGCGAACTGCGCGTGAAATTCAGCCGCAGCGCAGATGCTCCAGCCTAC |
| | | AAGCAGGGGCAGAACCAGCTCTACAACGAACTCAATCTTGGTCGGAGA |
| | | GAGGAGTACGACGTGCTGGACAAGCGGAGAGGACGGGACCCAGAAATG |
| | | GGCGGGAAGCCGCGCAGAAAGAATCCCCAAGAGGGCCTGTACAACGAG |
| | | CTCCAAAAGGATAAGATGGCAGAAGCCTATAGCGAGATTGGTATGAAA |
| | | GGGGAACGCAGAAGAGGCAAAGGCCACGACGGACTGTACCAGGGACTC |
| | | AGCACCGCCACCAAGGACACCTATGACGCTCTTCACATGCAGGCCCTG |
| | | CCGCCTCGG |

139113

| | | |
|---|---|---|
| 139113-aa | 1045 | EVQLVETGGGLVQPGGSLRLSCAVSGFALSNHGMSWVRRAPGKGLEWV |
| ScFv domain | | SGIVYSGSTYYAASVKGRFTISRDNSRNTLYLQMNSLRPEDTAIYYCS |
| | | AHGGESDVWGQGTTVTVSSASGGGGSGGRASGGGGSETTLTQSPATLS |
| | | VSPGERATLSCRASQSVGSNLAWYQQKPGQGPRLLIYGASTRATGIPA |
| | | RFSGSGSGTEFTLTISSLQPEDFAVYYCQQYNDWLPVTFGQGTKVEIK |
| 139113-nt | 1046 | GAAGTGCAATTGGTGGAAACTGGAGGAGGACTTGTGCAACCTGGAGGA |
| ScFv domain | | TCATTGCGGCTCTCATGCGCTGTCTCCGGCTTCGCCCTGTCAAATCAC |
| | | GGGATGTCGTGGGTCAGACGGGCCCCGGGAAAGGGTCTGGAATGGGTG |
| | | TCGGGGATTGTGTACAGCGGCTCCACCTACTACGCCGCTTCGGTCAAG |
| | | GGCCGCTTCACTATTTCACGGGACAACAGCCGCAACACCCTCTATCTG |
| | | CAAATGAACTCTCTCCGCCCGGAGGATACCGCCATCTACTACTGCTCC |
| | | GCACACGGCGGCGAATCCGACGTGTGGGGACAGGGAACCACTGTCACC |
| | | GTGTCGTCCGCATCCGGTGGCGGAGGATCGGGTGGCCGGGCCTCCGGG |
| | | GGCGGCGGCAGCGAGACTACCCTGACCCAGTCCCCTGCCACTCTGTCC |
| | | GTGAGCCCGGGAGAGAGAGCCACCCTTAGCTGCCGGGCCAGCCAGAGC |
| | | GTGGGCTCCAACCTGGCCTGGTACCAGCAGAAGCCAGGACAGGGTCCC |
| | | AGGCTGCTGATCTACGGAGCCTCCACTCGCGCGACCGGCATCCCCGCG |
| | | AGGTTCTCCGGGTCGGGTTCCGGGACCGAGTTCACCCTGACCATCTCC |
| | | TCCCTCCAACCGGAGGACTTCGCGGTGTACTACTGTCAGCAGTACAAC |
| | | GATTGGCTGCCCGTGACATTTGGACAGGGGACGAAGGTGGAAATCAAA |
| 139113-aa | 1047 | EVQLVETGGGLVQPGGSLRLSCAVSGFALSNHGMSWVRRAPGKGLEWV |
| VH | | SGIVYSGSTYYAASVKGRFTISRDNSRNTLYLQMNSLRPEDTAIYYCS |
| | | AHGGESDVWGQGTTVTVSS |
| 139113-aa | 1048 | ETTLTQSPATLSVSPGERATLSCRASQSVGSNLAWYQQKPGQGPRLLI |
| VL | | YGASTRATGIPARFSGSGSGTEFTLTISSLQPEDFAVYYCQQYNDWLP |
| | | VTFGQGTKVEIK |
| 139113-aa | 1049 | MALPVTALLLPLALLLHAARPEVQLVETGGGLVQPGGSLRLSCAVSGF |
| Full CAR | | ALSNHGMSWVRRAPGKGLEWVSGIVYSGSTYYAASVKGRFTISRDNSR |
| | | NTLYLQMNSLRPEDTAIYYCSAHGGESDVWGQGTTVTVSSASGGGGSG |
| | | GRASGGGGSETTLTQSPATLSVSPGERATLSCRASQSVGSNLAWYQQK |
| | | PGQGPRLLIYGASTRATGIPARFSGSGSGTEFTLTISSLQPEDFAVYY |
| | | CQQYNDWLPVTFGQGTKVEIKTTTPAPRPPTPAPTIASQPLSLRPEAC |
| | | RPAAGGAVHTRGLDFACDIYIWAPLAGTCGVLLLSLVITLYCKRGRKK |
| | | LLYIFKQPFMRPVQTTQEEDGCSCRFPEEEEGGCELRVKFSRSADAPA |
| | | YKQGQNQLYNELNLGRREEYDVLDKRRGRDPEMGGKPRRKNPQEGLYN |
| | | ELQKDKMAEAYSEIGMKGERRRGKGHDGLYQGLSTATKDTYDALHMQA |
| | | LPPR |
| 139113-nt | 1050 | ATGGCCCTCCCTGTCACCGCCCTGCTGCTTCCGCTGGCTCTTCTGCTC |
| Full CAR | | CACGCCGCTCGGCCCGAAGTGCAATTGGTGGAAACTGGAGGAGGACTT |
| | | GTGCAACCTGGAGGATCATTGCGGCTCTCATGCGCTGTCTCCGGCTTC |
| | | GCCCTGTCAAATCACGGGATGTCGTGGGTCAGACGGGCCCCGGGAAAG |
| | | GGTCTGGAATGGGTGTCGGGGATTGTGTACAGCGGCTCCACCTACTAC |
| | | GCCGCTTCGGTCAAGGGCCGCTTCACTATTTCACGGGACAACAGCCGC |
| | | AACACCCTCTATCTGCAAATGAACTCTCTCCGCCCGGAGGATACCGCC |
| | | ATCTACTACTGCTCCGCACACGGCGGCGAATCCGACGTGTGGGGACAG |
| | | GGAACCACTGTCACCGTGTCGTCCGCATCCGGTGGCGGAGGATCGGGT |
| | | GGCCGGGCCTCCGGGGGCGGCGGCAGCGAGACTACCCTGACCCAGTCC |
| | | CCTGCCACTCTGTCCGTGAGCCCGGGAGAGAGAGCCACCCTTAGCTGC |
| | | CGGGCCAGCCAGAGCGTGGGCTCCAACCTGGCCTGGTACCAGCAGAAG |
| | | CCAGGACAGGGTCCCAGGCTGCTGATCTACGGAGCCTCCACTCGCGCG |
| | | ACCGGCATCCCCGCGAGGTTCTCCGGGTCGGGTTCCGGGACCGAGTTC |
| | | ACCCTGACCATCTCCTCCCTCCAACCGGAGGACTTCGCGGTGTACTAC |
| | | TGTCAGCAGTACAACGATTGGCTGCCCGTGACATTTGGACAGGGGACG |
| | | AAGGTGGAAATCAAAACCACTACCCCAGCACCGAGGCCACCCACCCCG |
| | | GCTCCTACCATCGCCTCCCAGCCTCTGTCCCTGCGTCCGGAGGCATGT |
| | | AGACCCGCAGCTGGTGGGGCCGTGCATACCCGGGGTCTTGACTTCGCC |
| | | TGCGATATCTACATTTGGGCCCCTCTGGCTGGTACTTGCGGGGTCCTG |
| | | CTGCTTTCACTCGTGATCACTCTTTACTGTAAGCGCGGTCGGAAGAAG |
| | | CTGCTGTACATCTTTAAGCAACCCTTCATGAGGCCTGTGCAGACTACT |
| | | CAAGAGGAGGACGGCTGTTCATGCCGGTTCCCAGAGGAGGAGGAAGGC |
| | | GGCTGCGAACTGCGCGTGAAATTCAGCCGCAGCGCAGATGCTCCAGCC |
| | | TACAAGCAGGGGCAGAACCAGCTCTACAACGAACTCAATCTTGGTCGG |
| | | AGAGAGGAGTACGACGTGCTGGACAAGCGGAGAGGACGGGACCCAGAA |
| | | ATGGGCGGGAAGCCGCGCAGAAAGAATCCCCAAGAGGGCCTGTACAAC |
| | | GAGCTCCAAAAGGATAAGATGGCAGAAGCCTATAGCGAGATTGGTATG |
| | | AAAGGGGAACGCAGAAGAGGCAAAGGCCACGACGGACTGTACCAGGGA |
| | | CTCAGCACCGCCACCAAGGACACCTATGACGCTCTTCACATGCAGGCC |
| | | CTGCCGCCTCGG |

139114

| | | |
|---|---|---|
| 139114-aa | 1051 | EVQLVESGGGLVQPGGSLRLSCAVSGFALSNHGMSWVRRAPGKGLEWV |
| ScFv domain | | SGIVYSGSTYYAASVKGRFTISRDNSRNTLYLQMNSLRPEDTAIYYCS |
| | | AHGGESDVWGQGTTVTVSSASGGGGSGGRASGGGGSEIVLTQSPGTLS |
| | | LSPGERATLSCRASQSIGSSSLAWYQQKPGQAPRLLMYGASSRASGIP |
| | | DRFSGSGSGTDFTLTISRLEPEDFAVYYCQQYAGSPPFTFGQGTKVEI |
| | | K |
| 139114-nt | 1052 | GAAGTGCAATTGGTGGAATCTGGTGGAGGACTTGTGCAACCTGGAGGA |
| ScFv domain | | TCACTGAGACTGTCATGCGCGGTGTCCGGTTTTGCCCTGAGCAATCAT |
| | | GGGATGTCGTGGGTCCGGCGCGCCCCCGGAAAGGGTCTGGAATGGGTG |
| | | TCGGGTATCGTCTACTCCGGGAGCACTTACTACGCCGCGAGCGTGAAG |
| | | GGCCGCTTCACCATTTCCCGCGATAACTCCCGCAACACCCTGTACTTG |
| | | CAAATGAACTCGCTCCGGCCTGAGGACACTGCCATCTACTACTGCTCC |
| | | GCACACGGAGGAGAATCCGACGTGTGGGGCCAGGGAACTACCGTGACC |
| | | GTCAGCAGCGCCTCCGGCGGCGGGGGCTCAGGCGGACGGGCTAGCGGC |
| | | GGCGGTGGCTCCGAGATCGTGCTGACCCAGTCGCCTGGCACTCTCTCG |
| | | CTGAGCCCCGGGGAAAGGGCAACCCTGTCCTGTCGGGCCAGCCAGTCC |
| | | ATTGGATCATCCTCCCTCGCCTGGTATCAGCAGAAACCGGGACAGGCT |
| | | CCGCGGCTGCTTATGTATGGGGCCAGCTCAAGAGCCTCCGGCATTCCC |
| | | GACCGGTTCTCCGGGTCCGGTTCCGGCACCGATTTCACCCTGACTATC |
| | | TCGAGGCTGGAGCCAGAGGACTTCGCCGTGTACTACTGCCAGCAGTAC |
| | | GCGGGGTCCCCGCCGTTCACGTTCGGACAGGGAACCAAGGTCGAGATC |
| | | AAG |
| 139114-aa | 1053 | EVQLVESGGGLVQPGGSLRLSCAVSGFALSNHGMSWVRRAPGKGLEWV |
| VH | | SGIVYSGSTYYAASVKGRFTISRDNSRNTLYLQMNSLRPEDTAIYYCS |
| | | AHGGESDVWGQGTTVTVSS |
| 139114-aa | 1054 | EIVLTQSPGTLSLSPGERATLSCRASQSIGSSSLAWYQQKPGQAPRLL |
| VL | | MYGASSRASGIPDRFSGSGSGTDFTLTISRLEPEDFAVYYCQQYAGSP |
| | | PFTFGQGTKVEIK |
| 139114-aa | 1055 | MALPVTALLLPLALLLHAARPEVQLVESGGGLVQPGGSLRLSCAVSGF |
| Full CAR | | ALSNHGMSWVRRAPGKGLEWVSGIVYSGSTYYAASVKGRFTISRDNSR |
| | | NTLYLQMNSLRPEDTAIYYCSAHGGESDVWGQGTTVTVSSASGGGGSG |
| | | GRASGGGGSEIVLTQSPGTLSLSPGERATLSCRASQSIGSSSLAWYQQ |
| | | KPGQAPRLLMYGASSRASGIPDRFSGSGSGTDFTLTISRLEPEDFAVY |
| | | YCQQYAGSPPFTFGQGTKVEIKTTTPAPRPPTPAPTIASQPLSLRPEA |
| | | CRPAAGGAVHTRGLDFACDIYIWAPLAGTCGVLLLSLVITLYCKRGRK |
| | | KLLYIFKQPFMRPVQTTQEEDGCSCRFPEEEEGGCELRVKFSRSADAP |
| | | AYKQGQNQLYNELNLGRREEYDVLDKRRGRDPEMGGKPRRKNPQEGLY |
| | | NELQKDKMAEAYSEIGMKGERRRGKGHDGLYQGLSTATKDTYDALHMQ |
| | | ALPPR |
| 139114-nt | 1056 | ATGGCCCTCCCTGTCACCGCCCTGCTGCTTCCGCTGGCTCTTCTGCTC |
| Full CAR | | CACGCCGCTCGGCCCGAAGTGCAATTGGTGGAATCTGGTGGAGGACTT |
| | | GTGCAACCTGGAGGATCACTGAGACTGTCATGCGCGGTGTCCGGTTTT |
| | | GCCCTGAGCAATCATGGGATGTCGTGGGTCCGGCGCGCCCCCGGAAAG |
| | | GGTCTGGAATGGGTGTCGGGTATCGTCTACTCCGGGAGCACTTACTAC |
| | | GCCGCGAGCGTGAAGGGCCGCTTCACCATTTCCCGCGATAACTCCCGC |
| | | AACACCCTGTACTTGCAAATGAACTCGCTCCGGCCTGAGGACACTGCC |
| | | ATCTACTACTGCTCCGCACACGGAGGAGAATCCGACGTGTGGGGCCAG |
| | | GGAACTACCGTGACCGTCAGCAGCGCCTCCGGCGGCGGGGGCTCAGGC |
| | | GGACGGGCTAGCGGCGGCGGTGGCTCCGAGATCGTGCTGACCCAGTCG |
| | | CCTGGCACTCTCTCGCTGAGCCCCGGGGAAAGGGCAACCCTGTCCTGT |
| | | CGGGCCAGCCAGTCCATTGGATCATCCTCCCTCGCCTGGTATCAGCAG |
| | | AAACCGGGACAGGCTCCGCGGCTGCTTATGTATGGGGCCAGCTCAAGA |
| | | GCCTCCGGCATTCCCGACCGGTTCTCCGGGTCCGGTTCCGGCACCGAT |
| | | TTCACCCTGACTATCTCGAGGCTGGAGCCAGAGGACTTCGCCGTGTAC |
| | | TACTGCCAGCAGTACGCGGGGTCCCCGCCGTTCACGTTCGGACAGGGA |
| | | ACCAAGGTCGAGATCAAGACCACTACCCCAGCACCGAGGCCACCCACC |
| | | CCGGCTCCTACCATCGCCTCCCAGCCTCTGTCCCTGCGTCCGGAGGCA |
| | | TGTAGACCCGCAGCTGGTGGGGCCGTGCATACCCGGGGTCTTGACTTC |
| | | GCCTGCGATATCTACATTTGGGCCCCTCTGGCTGGTACTTGCGGGGTC |
| | | CTGCTGCTTTCACTCGTGATCACTCTTTACTGTAAGCGCGGTCGGAAG |
| | | AAGCTGCTGTACATCTTTAAGCAACCCTTCATGAGGCCTGTGCAGACT |
| | | ACTCAAGAGGAGGACGGCTGTTCATGCCGGTTCCCAGAGGAGGAGGAA |
| | | GGCGGCTGCGAACTGCGCGTGAAATTCAGCCGCAGCGCAGATGCTCCA |
| | | GCCTACAAGCAGGGGCAGAACCAGCTCTACAACGAACTCAATCTTGGT |
| | | CGGAGAGAGGAGTACGACGTGCTGGACAAGCGGAGAGGACGGGACCCA |
| | | GAAATGGGCGGGAAGCCGCGCAGAAAGAATCCCCAAGAGGGCCTGTAC |
| | | AACGAGCTCCAAAAGGATAAGATGGCAGAAGCCTATAGCGAGATTGGT |
| | | ATGAAAGGGGAACGCAGAAGAGGCAAAGGCCACGACGGACTGTACCAG |
| | | GGACTCAGCACCGCCACCAAGGACACCTATGACGCTCTTCACATGCAG |
| | | GCCCTGCCGCCTCGG |

149362

| | | |
|---|---|---|
| 149362-aa | 1057 | QVQLQESGPGLVKPSETLSLTCTVSGGSISSSYYYWGWIRQPPGKGLE |
| ScFv domain | | WIGSIYYSGSAYYNPSLKSRVTISVDTSKNQFSLRLSSVTAADTAVYY |
| | | CARHWQEWPDAFDIWGQGTMVTVSSGGGGSGGGGSGGGGSETTLTQSP |
| | | AFMSATPGDKVIISCKASQDIDDAMNWYQQKPGEAPLFIIQSATSPVP |
| | | GIPPRFSGSGFGTDFSLTINNIESEDAAYYFCLQHDNFPLTFGQGTKL |
| | | EIK |
| 149362-nt | 1058 | CAAGTGCAGCTTCAGGAAAGCGGACCGGGCCTGGTCAAGCCATCCGAA |
| ScFv domain | | ACTCTCTCCCTGACTTGCACTGTGTCTGGCGGTTCCATCTCATCGTCG |
| | | TACTACTACTGGGGCTGGATTAGGCAGCCGCCCGGAAAGGGACTGGAG |
| | | TGGATCGGAAGCATCTACTATTCCGGCTCGGCGTACTACAACCCTAGC |
| | | CTCAAGTCGAGAGTGACCATCTCCGTGGATACCTCCAAGAACCAGTTT |
| | | TCCCTGCGCCTGAGCTCCGTGACCGCCGCTGACACCGCCGTGTACTAC |
| | | TGTGCTCGGCATTGGCAGGAATGGCCCGATGCCTTCGACATTTGGGGC |
| | | CAGGGCACTATGGTCACTGTGTCATCCGGGGGTGGAGGCAGCGGGGGA |
| | | GGAGGGTCCGGGGGGGGAGGTTCAGAGACAACCTTGACCCAGTCACCC |
| | | GCATTCATGTCCGCCACTCCGGGAGACAAGGTCATCATCTCGTGCAAA |
| | | GCGTCCCAGGATATCGACGATGCCATGAATTGGTACCAGCAGAAGCCT |
| | | GGCGAAGCGCCGCTGTTCATTATCCAATCCGCAACCTCGCCCGTGCCT |
| | | GGAATCCCACCGCGGTTCAGCGGCAGCGGTTTCGGAACCGACTTTTCC |
| | | CTGACCATTAACAACATTGAGTCCGAGGACGCCGCCTACTACTTCTGC |
| | | CTGCAACACGACAACTTCCCTCTCACGTTCGGCCAGGGAACCAAGCTG |
| | | GAAATCAAG |
| 149362-aa | 1059 | QVQLQESGPGLVKPSETLSLTCTVSGGSISSSYYYWGWIRQPPGKGLE |
| VH | | WIGSIYYSGSAYYNPSLKSRVTISVDTSKNQFSLRLSSVTAADTAVYY |
| | | CARHWQEWPDAFDIWGQGTMVTVSS |
| 149362-aa | 1060 | ETTLTQSPAFMSATPGDKVIISCKASQDIDDAMNWYQQKPGEAPLFII |
| VL | | QSATSPVPGIPPRFSGSGFGTDFSLTINNIESEDAAYYFCLQHDNFPL |
| | | TFGQGTKLEIK |
| 149362-aa | 1061 | MALPVTALLLPLALLLHAARPQVQLQESGPGLVKPSETLSLTCTVSGG |
| Full CAR | | SISSSYYYWGWIRQPPGKGLEWIGSIYYSGSAYYNPSLKSRVTISVDT |
| | | SKNQFSLRLSSVTAADTAVYYCARHWQEWPDAFDIWGQGTMVTVSSGG |
| | | GGSGGGGSGGGGSETTLTQSPAFMSATPGDKVIISCKASQDIDDAMNW |
| | | YQQKPGEAPLFIIQSATSPVPGIPPRFSGSGFGTDFSLTINNIESEDA |
| | | AYYFCLQHDNFPLTFGQGTKLEIKTTTPAPRPPTPAPTIASQPLSLRP |
| | | EACRPAAGGAVHTRGLDFACDIYIWAPLAGTCGVLLLSLVITLYCKRG |
| | | RKKLLYIFKQPFMRPVQTTQEEDGCSCRFPEEEEGGCELRVKFSRSAD |
| | | APAYKQGQNQLYNELNLGRREEYDVLDKRRGRDPEMGGKPRRKNPQEG |
| | | LYNELQKDKMAEAYSEIGMKGERRRGKGHDGLYQGLSTATKDTYDALH |
| | | MQALPPR |
| 149362-nt | 1062 | ATGGCCCTCCCTGTCACCGCCCTGCTGCTTCCGCTGGCTCTTCTGCTC |
| Full CAR | | CACGCCGCTCGGCCCCAAGTGCAGCTTCAGGAAAGCGGACCGGGCCTG |
| | | GTCAAGCCATCCGAAACTCTCTCCCTGACTTGCACTGTGTCTGGCGGT |
| | | TCCATCTCATCGTCGTACTACTACTGGGGCTGGATTAGGCAGCCGCCC |
| | | GGAAAGGGACTGGAGTGGATCGGAAGCATCTACTATTCCGGCTCGGCG |
| | | TACTACAACCCTAGCCTCAAGTCGAGAGTGACCATCTCCGTGGATACC |
| | | TCCAAGAACCAGTTTTCCCTGCGCCTGAGCTCCGTGACCGCCGCTGAC |
| | | ACCGCCGTGTACTACTGTGCTCGGCATTGGCAGGAATGGCCCGATGCC |
| | | TTCGACATTTGGGGCCAGGGCACTATGGTCACTGTGTCATCCGGGGGT |
| | | GGAGGCAGCGGGGGAGGAGGGTCCGGGGGGGGAGGTTCAGAGACAACC |
| | | TTGACCCAGTCACCCGCATTCATGTCCGCCACTCCGGGAGACAAGGTC |
| | | ATCATCTCGTGCAAAGCGTCCCAGGATATCGACGATGCCATGAATTGG |
| | | TACCAGCAGAAGCCTGGCGAAGCGCCGCTGTTCATTATCCAATCCGCA |
| | | ACCTCGCCCGTGCCTGGAATCCCACCGCGGTTCAGCGGCAGCGGTTTC |
| | | GGAACCGACTTTTCCCTGACCATTAACAACATTGAGTCCGAGGACGCC |
| | | GCCTACTACTTCTGCCTGCAACACGACAACTTCCCTCTCACGTTCGGC |
| | | CAGGGAACCAAGCTGGAAATCAAGACCACTACCCCAGCACCGAGGCCA |
| | | CCCACCCCGGCTCCTACCATCGCCTCCCAGCCTCTGTCCCTGCGTCCG |
| | | GAGGCATGTAGACCCGCAGCTGGTGGGGCCGTGCATACCCGGGGTCTT |
| | | GACTTCGCCTGCGATATCTACATTTGGGCCCCTCTGGCTGGTACTTGC |
| | | GGGGTCCTGCTGCTTTCACTCGTGATCACTCTTTACTGTAAGCGCGGT |
| | | CGGAAGAAGCTGCTGTACATCTTTAAGCAACCCTTCATGAGGCCTGTG |
| | | CAGACTACTCAAGAGGAGGACGGCTGTTCATGCCGGTTCCCAGAGGAG |
| | | GAGGAAGGCGGCTGCGAACTGCGCGTGAAATTCAGCCGCAGCGCAGAT |
| | | GCTCCAGCCTACAAGCAGGGGCAGAACCAGCTCTACAACGAACTCAAT |
| | | CTTGGTCGGAGAGAGGAGTACGACGTGCTGGACAAGCGGAGAGGACGG |
| | | GACCCAGAAATGGGCGGGAAGCCGCGCAGAAAGAATCCCCAAGAGGGC |
| | | CTGTACAACGAGCTCCAAAAGGATAAGATGGCAGAAGCCTATAGCGAG |
| | | ATTGGTATGAAAGGGGAACGCAGAAGAGGCAAAGGCCACGACGGACTG |
| | | TACCAGGGACTCAGCACCGCCACCAAGGACACCTATGACGCTCTTCAC |
| | | ATGCAGGCCCTGCCGCCTCGG |

149363

| | | |
|---|---|---|
| 149363-aa | 1063 | VNLRESGPALVKPTQTLTLTCTFSGFSLRTSGMCVSWIRQPPGKALEW |
| ScFv domain | | LARIDWDEDKFYSTSLKTRLTISKDTSDNQVVLRMTNMDPADTATYYC |
| | | ARSGAGGTSATAFDIWGPGTMVTVSSGGGGSGGGGSGGGGSDIQMTQS |
| | | PSSLSASVGDRVTITCRASQDIYNNLAWFQLKPGSAPRSLMYAANKSQ |
| | | SGVPSRFSGSASGTDFTLTISSLQPEDFATYYCQHYYRFPYSFGQGTK |
| | | LEIK |
| 149363-nt | 1064 | CAAGTCAATCTGCGCGAATCCGGCCCCGCCTTGGTCAAGCCTACCCAG |
| ScFv domain | | ACCCTCACTCTGACCTGTACTTTCTCCGGCTTCTCCCTGCGGACTTCC |
| | | GGGATGTGCGTGTCCTGGATCAGACAGCCTCCGGGAAAGGCCCTGGAG |
| | | TGGCTCGCTCGCATTGACTGGGATGAGGACAAGTTCTACTCCACCTCA |
| | | CTCAAGACCAGGCTGACCATCAGCAAAGATACCTCTGACAACCAAGTG |
| | | GTGCTCCGCATGACCAACATGGACCCAGCCGACACTGCCACTTACTAC |
| | | TGCGCGAGGAGCGGAGCGGGCGGAACCTCCGCCACCGCCTTCGATATT |
| | | TGGGGCCCGGGTACCATGGTCACCGTGTCAAGCGGAGGAGGGGGGTCC |
| | | GGGGGCGGCGGTTCCGGGGGAGGCGGATCGGACATTCAGATGACTCAG |
| | | TCACCATCGTCCCTGAGCGCTAGCGTGGGCGACAGAGTGACAATCACT |
| | | TGCCGGGCATCCCAGGACATCTATAACAACCTTGCGTGGTTCCAGCTG |
| | | AAGCCTGGTTCCGCACCGCGGTCACTTATGTACGCCGCCAACAAGAGC |
| | | CAGTCGGGAGTGCCGTCCCGGTTTTCCGGTTCGGCCTCGGGAACTGAC |
| | | TTCACCCTGACGATCTCCAGCCTGCAACCCGAGGATTTCGCCACCTAC |
| | | TACTGCCAGCACTACTACCGCTTTCCCTACTCGTTCGGACAGGGAACC |
| | | AAGCTGGAAATCAAG |
| 149363-aa | 1065 | QVNLRESGPALVKPTQTLTLTCTFSGFSLRTSGMCVSWIRQPPGKALE |
| VH | | WLARIDWDEDKFYSTSLKTRLTISKDTSDNQVVLRMTNMDPADTATYY |
| | | CARSGAGGTSATAFDIWGPGTMVTVSS |
| 149363-aa | 1066 | DIQMTQSPSSLSASVGDRVTITCRASQDIYNNLAWFQLKPGSAPRSLM |
| VL | | YAANKSQSGVPSRFSGSASGTDFTLTISSLQPEDFATYYCQHYYRFPY |
| | | SFGQGTKLEIK |
| 149363-aa | 1067 | MALPVTALLLPLALLLHAARPQVNLRESGPALVKPTQTLTLTCTFSGF |
| Full CAR | | SLRTSGMCVSWIRQPPGKALEWLARIDWDEDKFYSTSLKTRLTISKDT |
| | | SDNQVVLRMTNMDPADTATYYCARSGAGGTSATAFDIWGPGTMVTVSS |
| | | GGGGSGGGGSGGGGSDIQMTQSPSSLSASVGDRVTITCRASQDIYNNL |
| | | AWFQLKPGSAPRSLMYAANKSQSGVPSRFSGSASGTDFTLTISSLQPE |
| | | DFATYYCQHYYRFPYSFGQGTKLEIKTTTPAPRPPTPAPTIASQPLSL |
| | | RPEACRPAAGGAVHTRGLDFACDIYIWAPLAGTCGVLLLSLVITLYCK |
| | | RGRKKLLYIFKQPFMRPVQTTQEEDGCSCRFPEEEEGGCELRVKFSRS |
| | | ADAPAYKQGQNQLYNELNLGRREEYDVLDKRRGRDPEMGGKPRRKNPQ |
| | | EGLYNELQKDKMAEAYSEIGMKGERRRGKGHDGLYQGLSTATKDTYDA |
| | | LHMQALPPR |
| 149363-nt | 1068 | ATGGCCCTCCCTGTCACCGCCCTGCTGCTTCCGCTGGCTCTTCTGCTC |
| Full CAR | | CACGCCGCTCGGCCCCAAGTCAATCTGCGCGAATCCGGCCCCGCCTTG |
| | | GTCAAGCCTACCCAGACCCTCACTCTGACCTGTACTTTCTCCGGCTTC |
| | | TCCCTGCGGACTTCCGGGATGTGCGTGTCCTGGATCAGACAGCCTCCG |
| | | GGAAAGGCCCTGGAGTGGCTCGCTCGCATTGACTGGGATGAGGACAAG |
| | | TTCTACTCCACCTCACTCAAGACCAGGCTGACCATCAGCAAAGATACC |
| | | TCTGACAACCAAGTGGTGCTCCGCATGACCAACATGGACCCAGCCGAC |
| | | ACTGCCACTTACTACTGCGCGAGGAGCGGAGCGGGCGGAACCTCCGCC |
| | | ACCGCCTTCGATATTTGGGGCCCGGGTACCATGGTCACCGTGTCAAGC |
| | | GGAGGAGGGGGGTCCGGGGGCGGCGGTTCCGGGGGAGGCGGATCGGAC |
| | | ATTCAGATGACTCAGTCACCATCGTCCCTGAGCGCTAGCGTGGGCGAC |
| | | AGAGTGACAATCACTTGCCGGGCATCCCAGGACATCTATAACAACCTT |
| | | GCGTGGTTCCAGCTGAAGCCTGGTTCCGCACCGCGGTCACTTATGTAC |
| | | GCCGCCAACAAGAGCCAGTCGGGAGTGCCGTCCCGGTTTTCCGGTTCG |
| | | GCCTCGGGAACTGACTTCACCCTGACGATCTCCAGCCTGCAACCCGAG |
| | | GATTTCGCCACCTACTACTGCCAGCACTACTACCGCTTTCCCTACTCG |
| | | TTCGGACAGGGAACCAAGCTGGAAATCAAGACCACTACCCCAGCACCG |
| | | AGGCCACCCACCCCGGCTCCTACCATCGCCTCCCAGCCTCTGTCCCTG |
| | | CGTCCGGAGGCATGTAGACCCGCAGCTGGTGGGGCCGTGCATACCCGG |
| | | GGTCTTGACTTCGCCTGCGATATCTACATTTGGGCCCCTCTGGCTGGT |
| | | ACTTGCGGGGTCCTGCTGCTTTCACTCGTGATCACTCTTTACTGTAAG |
| | | CGCGGTCGGAAGAAGCTGCTGTACATCTTTAAGCAACCCTTCATGAGG |
| | | CCTGTGCAGACTACTCAAGAGGAGGACGGCTGTTCATGCCGGTTCCCA |
| | | GAGGAGGAGGAAGGCGGCTGCGAACTGCGCGTGAAATTCAGCCGCAGC |
| | | GCAGATGCTCCAGCCTACAAGCAGGGGCAGAACCAGCTCTACAACGAA |
| | | CTCAATCTTGGTCGGAGAGAGGAGTACGACGTGCTGGACAAGCGGAGA |
| | | GGACGGGACCCAGAAATGGGCGGGAAGCCGCGCAGAAAGAATCCCCAA |
| | | GAGGGCCTGTACAACGAGCTCCAAAAGGATAAGATGGCAGAAGCCTAT |
| | | AGCGAGATTGGTATGAAAGGGGAACGCAGAAGAGGCAAAGGCCACGAC |
| | | GGACTGTACCAGGGACTCAGCACCGCCACCAAGGACACCTATGACGCT |
| | | CTTCACATGCAGGCCCTGCCGCCTCGG |

149364

| | | |
|---|---|---|
| 149364-aa | 1069 | EVQLVESGGGLVKPGGSLRLSCAASGFTFSSYSMNWVRQAPGKGLEWV |
| ScFv domain | | SSISSSSSYIYYADSVKGRFTISRDNAKNSLYLQMNSLRAEDTAVYYC |
| | | AKTIAAVYAFDIWGQGTTVTVSSGGGGSGGGGSGGGGSEIVLTQSPLS |
| | | LPVTPEEPASISCRSSQSLLHSNGYNYLDWYLQKPGQSPQLLIYLGSN |
| | | RASGVPDRFSGSGSGTDFTLKISRVEAEDVGVYYCMQALQTPYTFGQG |
| | | TKLEIK |
| 149364-nt | 1070 | GAAGTGCAGCTTGTCGAATCCGGGGGGGGACTGGTCAAGCCGGGCGGA |
| ScFv domain | | TCACTGAGACTGTCCTGCGCCGCGAGCGGCTTCACGTTCTCCTCCTAC |
| | | TCCATGAACTGGGTCCGCCAAGCCCCCGGGAAGGGACTGGAATGGGTG |
| | | TCCTCTATCTCCTCGTCGTCGTCCTACATCTACTACGCCGACTCCGTG |
| | | AAGGGAAGATTCACCATTTCCCGCGACAACGCAAAGAACTCACTGTAC |
| | | TTGCAAATGAACTCACTCCGGGCCGAAGATACTGCTGTGTACTATTGC |
| | | GCCAAGACTATTGCCGCCGTCTACGCTTTCGACATCTGGGGCCAGGGA |
| | | ACCACCGTGACTGTGTCGTCCGGTGGTGGTGGCTCGGGCGGAGGAGGA |
| | | AGCGGCGGCGGGGGGTCCGAGATTGTGCTGACCCAGTCGCCACTGAGC |
| | | CTCCCTGTGACCCCCGAGGAACCCGCCAGCATCAGCTGCCGGTCCAGC |
| | | CAGTCCCTGCTCCACTCCAACGGATACAATTACCTCGATTGGTACCTT |
| | | CAGAAGCCTGGACAAAGCCCGCAGCTGCTCATCTACTTGGGATCAAAC |
| | | CGCGCGTCAGGAGTGCCTGACCGGTTCTCCGGCTCGGGCAGCGGTACC |
| | | GATTTCACCCTGAAAATCTCCAGGGTGGAGGCAGAGGACGTGGGAGTG |
| | | TATTACTGTATGCAGGCGCTGCAGACTCCGTACACATTTGGGCAGGGC |
| | | ACCAAGCTGGAGATCAAG |
| 149364-aa | 1071 | EVQLVESGGGLVKPGGSLRLSCAASGFTFSSYSMNWVRQAPGKGLEWV |
| VH | | SSISSSSSYIYYADSVKGRFTISRDNAKNSLYLQMNSLRAEDTAVYYC |
| | | AKTIAAVYAFDIWGQGTTVTVSS |
| 149364-aa | 1072 | EIVLTQSPLSLPVTPEEPASISCRSSQSLLHSNGYNYLDWYLQKPGQS |
| VL | | PQLLIYLGSNRASGVPDRFSGSGSGTDFTLKISRVEAEDVGVYYCMQA |
| | | LQTPYTFGQGTKLEIK |
| 149364-aa | 1073 | MALPVTALLLPLALLLHAARPEVQLVESGGGLVKPGGSLRLSCAASGF |
| Full CAR | | TFSSYSMNWVRQAPGKGLEWVSSISSSSSYIYYADSVKGRFTISRDNA |
| | | KNSLYLQMNSLRAEDTAVYYCAKTIAAVYAFDIWGQGTTVTVSSGGGG |
| | | SGGGGSGGGGSEIVLTQSPLSLPVTPEEPASISCRSSQSLLHSNGYNY |
| | | LDWYLQKPGQSPQLLIYLGSNRASGVPDRFSGSGSGTDFTLKISRVEA |
| | | EDVGVYYCMQALQTPYTFGQGTKLEIKTTTPAPRPPTPAPTIASQPLS |
| | | LRPEACRPAAGGAVHTRGLDFACDIYIWAPLAGTCGVLLLSLVITLYC |
| | | KRGRKKLLYIFKQPFMRPVQTTQEEDGCSCRFPEEEEGGCELRVKFSR |
| | | SADAPAYKQGQNQLYNELNLGRREEYDVLDKRRGRDPEMGGKPRRKNP |
| | | QEGLYNELQKDKMAEAYSEIGMKGERRRGKGHDGLYQGLSTATKDTYD |
| | | ALHMQALPPR |
| 149364-nt | 1074 | ATGGCCCTCCCTGTCACCGCCCTGCTGCTTCCGCTGGCTCTTCTGCTC |
| Full CAR | | CACGCCGCTCGGCCCGAAGTGCAGCTTGTCGAATCCGGGGGGGGACTG |
| | | GTCAAGCCGGGCGGATCACTGAGACTGTCCTGCGCCGCGAGCGGCTTC |
| | | ACGTTCTCCTCCTACTCCATGAACTGGGTCCGCCAAGCCCCCGGGAAG |
| | | GGACTGGAATGGGTGTCCTCTATCTCCTCGTCGTCGTCCTACATCTAC |
| | | TACGCCGACTCCGTGAAGGGAAGATTCACCATTTCCCGCGACAACGCA |
| | | AAGAACTCACTGTACTTGCAAATGAACTCACTCCGGGCCGAAGATACT |
| | | GCTGTGTACTATTGCGCCAAGACTATTGCCGCCGTCTACGCTTTCGAC |
| | | ATCTGGGGCCAGGGAACCACCGTGACTGTGTCGTCCGGTGGTGGTGGC |
| | | TCGGGCGGAGGAGGAAGCGGCGGCGGGGGGTCCGAGATTGTGCTGACC |
| | | CAGTCGCCACTGAGCCTCCCTGTGACCCCCGAGGAACCCGCCAGCATC |
| | | AGCTGCCGGTCCAGCCAGTCCCTGCTCCACTCCAACGGATACAATTAC |
| | | CTCGATTGGTACCTTCAGAAGCCTGGACAAAGCCCGCAGCTGCTCATC |
| | | TACTTGGGATCAAACCGCGCGTCAGGAGTGCCTGACCGGTTCTCCGGC |
| | | TCGGGCAGCGGTACCGATTTCACCCTGAAAATCTCCAGGGTGGAGGCA |
| | | GAGGACGTGGGAGTGTATTACTGTATGCAGGCGCTGCAGACTCCGTAC |
| | | ACATTTGGGCAGGGCACCAAGCTGGAGATCAAGACCACTACCCCAGCA |
| | | CCGAGGCCACCCACCCCGGCTCCTACCATCGCCTCCCAGCCTCTGTCC |
| | | CTGCGTCCGGAGGCATGTAGACCCGCAGCTGGTGGGGCCGTGCATACC |
| | | CGGGGTCTTGACTTCGCCTGCGATATCTACATTTGGGCCCCTCTGGCT |
| | | GGTACTTGCGGGGTCCTGCTGCTTTCACTCGTGATCACTCTTTACTGT |
| | | AAGCGCGGTCGGAAGAAGCTGCTGTACATCTTTAAGCAACCCTTCATG |
| | | AGGCCTGTGCAGACTACTCAAGAGGAGGACGGCTGTTCATGCCGGTTC |
| | | CCAGAGGAGGAGGAAGGCGGCTGCGAACTGCGCGTGAAATTCAGCCGC |
| | | AGCGCAGATGCTCCAGCCTACAAGCAGGGGCAGAACCAGCTCTACAAC |
| | | GAACTCAATCTTGGTCGGAGAGAGGAGTACGACGTGCTGGACAAGCGG |
| | | AGAGGACGGGACCCAGAAATGGGCGGGAAGCCGCGCAGAAAGAATCCC |
| | | CAAGAGGGCCTGTACAACGAGCTCCAAAAGGATAAGATGGCAGAAGCC |
| | | TATAGCGAGATTGGTATGAAAGGGGAACGCAGAAGAGGCAAAGGCCAC |
| | | GACGGACTGTACCAGGGACTCAGCACCGCCACCAAGGACACCTATGAC |
| | | GCTCTTCACATGCAGGCCCTGCCGCCTCGG |

149365

| | | |
|---|---|---|
| 149365-aa | 1075 | EVQLVESGGGLVKPGGSLRLSCAASGFTFSDYYMSWIRQAPGKGLEWV |
| ScFv domain | | SYISSSGSTIYYADSVKGRFTISRDNAKNSLYLQMNSLRAEDTAVYYC |
| | | ARDLRGAFDIWGQGTMVTVSSGGGGSGGGGSGGGGSSYVLTQSPSVSA |
| | | APGYTATISCGGNNIGTKSVHWYQQKPGQAPLLVIRDDSVRPSKIPGR |
| | | FSGSNSGNMATLTISGVQAGDEADFYCQVWDSDSEHVVFGGGTKLTVL |
| 149365-nt | 1076 | GAAGTCCAGCTCGTGGAGTCCGGCGGAGGCCTTGTGAAGCCTGGAGGT |
| ScFv domain | | TCGCTGAGACTGTCCTGCGCCGCCTCCGGCTTCACCTTCTCCGACTAC |
| | | TACATGTCCTGGATCAGACAGGCCCCGGGAAAGGGCCTGGAATGGGTG |
| | | TCCTACATCTCGTCATCGGGCAGCACTATCTACTACGCGGACTCAGTG |
| | | AAGGGGCGGTTCACCATTTCCCGGGATAACGCGAAGAACTCGCTGTAT |
| | | CTGCAAATGAACTCACTGAGGGCCGAGGACACCGCCGTGTACTACTGC |
| | | GCCCGCGATCTCCGCGGGGCATTTGACATCTGGGGACAGGGAACCATG |
| | | GTCACAGTGTCCAGCGGAGGGGGAGGATCGGGTGGCGGAGGTTCCGGG |
| | | GGTGGAGGCTCCTCCTACGTGCTGACTCAGAGCCCAAGCGTCAGCGCT |
| | | GCGCCCGGTTACACGGCAACCATCTCCTGTGGCGGAAACAACATTGGG |
| | | ACCAAGTCTGTGCACTGGTATCAGCAGAAGCCGGGCCAAGCTCCCCTG |
| | | TTGGTGATCCGCGATGACTCCGTGCGGCCTAGCAAAATTCCGGGACGG |
| | | TTCTCCGGCTCCAACAGCGGCAATATGGCCACTCTCACCATCTCGGGA |
| | | GTGCAGGCCGGAGATGAAGCCGACTTCTACTGCCAAGTCTGGGACTCA |
| | | GACTCCGAGCATGTGGTGTTCGGGGGCGGAACCAAGCTGACTGTGCTC |
| 149365-aa | 1077 | EVQLVESGGGLVKPGGSLRLSCAASGFTFSDYYMSWIRQAPGKGLEWV |
| VH | | SYISSSGSTIYYADSVKGRFTISRDNAKNSLYLQMNSLRAEDTAVYYC |
| | | ARDLRGAFDIWGQGTMVTVSS |
| 149365-aa | 1078 | SYVLTQSPSVSAAPGYTATISCGGNNIGTKSVHWYQQKPGQAPLLVIR |
| VL | | DDSVRPSKIPGRFSGSNSGNMATLTISGVQAGDEADFYCQVWDSDSEH |
| | | VVFGGGTKLTVL |
| 149365-aa | 1079 | MALPVTALLLPLALLLHAARPEVQLVESGGGLVKPGGSLRLSCAASGF |
| Full CAR | | TFSDYYMSWIRQAPGKGLEWVSYISSSGSTIYYADSVKGRFTISRDNA |
| | | KNSLYLQMNSLRAEDTAVYYCARDLRGAFDIWGQGTMVTVSSGGGGSG |
| | | GGGSGGGGSSYVLTQSPSVSAAPGYTATISCGGNNIGTKSVHWYQQKP |
| | | GQAPLLVIRDDSVRPSKIPGRFSGSNSGNMATLTISGVQAGDEADFYC |
| | | QVWDSDSEHVVFGGGTKLTVLTTTPAPRPPTPAPTIASQPLSLRPEAC |
| | | RPAAGGAVHTRGLDFACDIYIWAPLAGTCGVLLLSLVITLYCKRGRKK |
| | | LLYIFKQPFMRPVQTTQEEDGCSCRFPEEEEGGCELRVKFSRSADAPA |
| | | YKQGQNQLYNELNLGRREEYDVLDKRRGRDPEMGGKPRRKNPQEGLYN |
| | | ELQKDKMAEAYSEIGMKGERRRGKGHDGLYQGLSTATKDTYDALHMQA |
| | | LPPR |
| 149365-nt | 1080 | ATGGCCCTCCCTGTCACCGCCCTGCTGCTTCCGCTGGCTCTTCTGCTC |
| Full CAR | | CACGCCGCTCGGCCCGAAGTCCAGCTCGTGGAGTCCGGCGGAGGCCTT |
| | | GTGAAGCCTGGAGGTTCGCTGAGACTGTCCTGCGCCGCCTCCGGCTTC |
| | | ACCTTCTCCGACTACTACATGTCCTGGATCAGACAGGCCCCGGGAAAG |
| | | GGCCTGGAATGGGTGTCCTACATCTCGTCATCGGGCAGCACTATCTAC |
| | | TACGCGGACTCAGTGAAGGGGCGGTTCACCATTTCCCGGGATAACGCG |
| | | AAGAACTCGCTGTATCTGCAAATGAACTCACTGAGGGCCGAGGACACC |
| | | GCCGTGTACTACTGCGCCCGCGATCTCCGCGGGGCATTTGACATCTGG |
| | | GGACAGGGAACCATGGTCACAGTGTCCAGCGGAGGGGGAGGATCGGGT |
| | | GGCGGAGGTTCCGGGGGTGGAGGCTCCTCCTACGTGCTGACTCAGAGC |
| | | CCAAGCGTCAGCGCTGCGCCCGGTTACACGGCAACCATCTCCTGTGGC |
| | | GGAAACAACATTGGGACCAAGTCTGTGCACTGGTATCAGCAGAAGCCG |
| | | GGCCAAGCTCCCCTGTTGGTGATCCGCGATGACTCCGTGCGGCCTAGC |
| | | AAAATTCCGGGACGGTTCTCCGGCTCCAACAGCGGCAATATGGCCACT |
| | | CTCACCATCTCGGGAGTGCAGGCCGGAGATGAAGCCGACTTCTACTGC |
| | | CAAGTCTGGGACTCAGACTCCGAGCATGTGGTGTTCGGGGGCGGAACC |
| | | AAGCTGACTGTGCTCACCACTACCCCAGCACCGAGGCCACCCACCCCG |
| | | GCTCCTACCATCGCCTCCCAGCCTCTGTCCCTGCGTCCGGAGGCATGT |
| | | AGACCCGCAGCTGGTGGGGCCGTGCATACCCGGGGTCTTGACTTCGCC |
| | | TGCGATATCTACATTTGGGCCCCTCTGGCTGGTACTTGCGGGGTCCTG |
| | | CTGCTTTCACTCGTGATCACTCTTTACTGTAAGCGCGGTCGGAAGAAG |
| | | CTGCTGTACATCTTTAAGCAACCCTTCATGAGGCCTGTGCAGACTACT |
| | | CAAGAGGAGGACGGCTGTTCATGCCGGTTCCCAGAGGAGGAGGAAGGC |
| | | GGCTGCGAACTGCGCGTGAAATTCAGCCGCAGCGCAGATGCTCCAGCC |
| | | TACAAGCAGGGGCAGAACCAGCTCTACAACGAACTCAATCTTGGTCGG |
| | | AGAGAGGAGTACGACGTGCTGGACAAGCGGAGAGGACGGGACCCAGAA |
| | | ATGGGCGGGAAGCCGCGCAGAAAGAATCCCCAAGAGGGCCTGTACAAC |
| | | GAGCTCCAAAAGGATAAGATGGCAGAAGCCTATAGCGAGATTGGTATG |
| | | AAAGGGGAACGCAGAAGAGGCAAAGGCCACGACGGACTGTACCAGGGA |
| | | CTCAGCACCGCCACCAAGGACACCTATGACGCTCTTCACATGCAGGCC |
| | | CTGCCGCCTCGG |

149366

| | | |
|---|---|---|
| 149366-aa | 1081 | QVQLVQSGAEVKKPGASVKVSCKPSGYTVTSHYIHWVRRAPGQGLEWM |
| ScFv domain | | GMINPSGGVTAYSQTLQGRVTMTSDTSSSTVYMELSSLRSEDTAMYYC |
| | | AREGSGSGWYFDFWGRGTLVTVSSGGGGSGGGGSGGGGSSYVLTQPPS |
| | | VSVSPGQTASITCSGDGLSKKYVSWYQQKAGQSPVVLISRDKERPSGI |
| | | PDRFSGSNSADTATLTISGTQAMDEADYYCQAWDDTTVVFGGGTKLTV |
| | | L |
| 149366-nt | 1082 | CAAGTGCAGCTGGTGCAGAGCGGGGCCGAAGTCAAGAAGCCGGGAGCC |
| ScFv domain | | TCCGTGAAAGTGTCCTGCAAGCCTTCGGGATACACCGTGACCTCCCAC |
| | | TACATTCATTGGGTCCGCCGCGCCCCCGGCCAAGGACTCGAGTGGATG |
| | | GGCATGATCAACCCTAGCGGCGGAGTGACCGCGTACAGCCAGACGCTG |
| | | CAGGGACGCGTGACTATGACCTCGGATACCTCCTCCTCCACCGTCTAT |
| | | ATGGAACTGTCCAGCCTGCGGTCCGAGGATACCGCCATGTACTACTGC |
| | | GCCCGGGAAGGATCAGGCTCCGGGTGGTATTTCGACTTCTGGGGAAGA |
| | | GGCACCCTCGTGACTGTGTCATCTGGGGGAGGGGGTTCCGGTGGTGGC |
| | | GGATCGGGAGGAGGCGGTTCATCCTACGTGCTGACCCAGCCACCCTCC |
| | | GTGTCCGTGAGCCCCGGCCAGACTGCATCGATTACATGTAGCGGCGAC |
| | | GGCCTCTCCAAGAAATACGTGTCGTGGTACCAGCAGAAGGCCGGACAG |
| | | AGCCCGGTGGTGCTGATCTCAAGAGATAAGGAGCGGCCTAGCGGAATC |
| | | CCGGACAGGTTCTCGGGTTCCAACTCCGCGGACACTGCTACTCTGACC |
| | | ATCTCGGGGACCCAGGCTATGGACGAAGCCGATTACTACTGCCAAGCC |
| | | TGGGACGACACTACTGTCGTGTTTGGAGGGGGCACCAAGTTGACCGTC |
| | | CTT |
| 149366-aa | 1083 | QVQLVQSGAEVKKPGASVKVSCKPSGYTVTSHYIHWVRRAPGQGLEWM |
| VH | | GMINPSGGVTAYSQTLQGRVTMTSDTSSSTVYMELSSLRSEDTAMYYC |
| | | AREGSGSGWYFDFWGRGTLVTVSS |
| 149366-aa | 1084 | SYVLTQPPSVSVSPGQTASITCSGDGLSKKYVSWYQQKAGQSPVVLIS |
| VL | | RDKERPSGIPDRFSGSNSADTATLTISGTQAMDEADYYCQAWDDTTVV |
| | | FGGGTKLTVL |
| 149366-aa | 1085 | MALPVTALLLPLALLLHAARPQVQLVQSGAEVKKPGASVKVSCKPSGY |
| Full CAR | | TVTSHYIHWVRRAPGQGLEWMGMINPSGGVTAYSQTLQGRVTMTSDTS |
| | | SSTVYMELSSLRSEDTAMYYCAREGSGSGWYFDFWGRGTLVTVSSGGG |
| | | GSGGGGSGGGGSSYVLTQPPSVSVSPGQTASITCSGDGLSKKYVSWYQ |
| | | QKAGQSPVVLISRDKERPSGIPDRFSGSNSADTATLTISGTQAMDEAD |
| | | YYCQAWDDTTVVFGGGTKLTVLTTTPAPRPPTPAPTIASQPLSLRPEA |
| | | CRPAAGGAVHTRGLDFACDIYIWAPLAGTCGVLLLSLVITLYCKRGRK |
| | | KLLYIFKQPFMRPVQTTQEEDGCSCRFPEEEEGGCELRVKFSRSADAP |
| | | AYKQGQNQLYNELNLGRREEYDVLDKRRGRDPEMGGKPRRKNPQEGLY |
| | | NELQKDKMAEAYSEIGMKGERRRGKGHDGLYQGLSTATKDTYDALHMQ |
| | | ALPPR |
| 149366-nt | 1086 | ATGGCCCTCCCTGTCACCGCCCTGCTGCTTCCGCTGGCTCTTCTGCTC |
| Full CAR | | CACGCCGCTCGGCCCCAAGTGCAGCTGGTGCAGAGCGGGGCCGAAGTC |
| | | AAGAAGCCGGGAGCCTCCGTGAAAGTGTCCTGCAAGCCTTCGGGATAC |
| | | ACCGTGACCTCCCACTACATTCATTGGGTCCGCCGCGCCCCCGGCCAA |
| | | GGACTCGAGTGGATGGGCATGATCAACCCTAGCGGCGGAGTGACCGCG |
| | | TACAGCCAGACGCTGCAGGGACGCGTGACTATGACCTCGGATACCTCC |
| | | TCCTCCACCGTCTATATGGAACTGTCCAGCCTGCGGTCCGAGGATACC |
| | | GCCATGTACTACTGCGCCCGGGAAGGATCAGGCTCCGGGTGGTATTTC |
| | | GACTTCTGGGGAAGAGGCACCCTCGTGACTGTGTCATCTGGGGGAGGG |
| | | GGTTCCGGTGGTGGCGGATCGGGAGGAGGCGGTTCATCCTACGTGCTG |
| | | ACCCAGCCACCCTCCGTGTCCGTGAGCCCCGGCCAGACTGCATCGATT |
| | | ACATGTAGCGGCGACGGCCTCTCCAAGAAATACGTGTCGTGGTACCAG |
| | | CAGAAGGCCGGACAGAGCCCGGTGGTGCTGATCTCAAGAGATAAGGAG |
| | | CGGCCTAGCGGAATCCCGGACAGGTTCTCGGGTTCCAACTCCGCGGAC |
| | | ACTGCTACTCTGACCATCTCGGGGACCCAGGCTATGGACGAAGCCGAT |
| | | TACTACTGCCAAGCCTGGGACGACACTACTGTCGTGTTTGGAGGGGGC |
| | | ACCAAGTTGACCGTCCTTACCACTACCCCAGCACCGAGGCCACCCACC |
| | | CCGGCTCCTACCATCGCCTCCCAGCCTCTGTCCCTGCGTCCGGAGGCA |
| | | TGTAGACCCGCAGCTGGTGGGGCCGTGCATACCCGGGGTCTTGACTTC |
| | | GCCTGCGATATCTACATTTGGGCCCCTCTGGCTGGTACTTGCGGGGTC |
| | | CTGCTGCTTTCACTCGTGATCACTCTTTACTGTAAGCGCGGTCGGAAG |
| | | AAGCTGCTGTACATCTTTAAGCAACCCTTCATGAGGCCTGTGCAGACT |
| | | ACTCAAGAGGAGGACGGCTGTTCATGCCGGTTCCCAGAGGAGGAGGAA |
| | | GGCGGCTGCGAACTGCGCGTGAAATTCAGCCGCAGCGCAGATGCTCCA |
| | | GCCTACAAGCAGGGGCAGAACCAGCTCTACAACGAACTCAATCTTGGT |
| | | CGGAGAGAGGAGTACGACGTGCTGGACAAGCGGAGAGGACGGGACCCA |
| | | GAAATGGGCGGGAAGCCGCGCAGAAAGAATCCCCAAGAGGGCCTGTAC |
| | | AACGAGCTCCAAAAGGATAAGATGGCAGAAGCCTATAGCGAGATTGGT |
| | | ATGAAAGGGGAACGCAGAAGAGGCAAAGGCCACGACGGACTGTACCAG |
| | | GGACTCAGCACCGCCACCAAGGACACCTATGACGCTCTTCACATGCAG |
| | | GCCCTGCCGCCTCGG |

149367

| | | |
|---|---|---|
| 149367-aa | 1087 | QVQLQESGPGLVKPSQTLSLTCTVSGGSISSGGYYWSWIRQHPGKGLE |
| ScFv domain | | WIGYIYYSGSTYYNPSLKSRVTISVDTSKNQFSLKLSSVTAADTAVYY |
| | | CARAGIAARLRGAFDIWGQGTMVTVSSGGGGSGGGGSGGGGSDIVMTQ |
| | | SPSSVSASVGDRVIITCRASQGIRNWLAWYQQKPGKAPNLLIYAASNL |
| | | QSGVPSRFSGSGSGADFTLTISSLQPEDVATYYCQKYNSAPFTFGPGT |
| | | KVDIK |
| 149367-nt | 1088 | CAAGTGCAGCTTCAGGAGAGCGGCCCGGGACTCGTGAAGCCGTCCCAG |
| ScFv domain | | ACCCTGTCCCTGACTTGCACCGTGTCGGGAGGAAGCATCTCGAGCGGA |
| | | GGCTACTATTGGTCGTGGATTCGGCAGCACCCTGGAAAGGGCCTGGAA |
| | | TGGATCGGCTACATCTACTACTCCGGCTCGACCTACTACAACCCATCG |
| | | CTGAAGTCCAGAGTGACAATCTCAGTGGACACGTCCAAGAATCAGTTC |
| | | AGCCTGAAGCTCTCTTCCGTGACTGCGGCCGACACCGCCGTGTACTAC |
| | | TGCGCACGCGCTGGAATTGCCGCCCGGCTGAGGGGTGCCTTCGACATT |
| | | TGGGGACAGGGCACCATGGTCACCGTGTCCTCCGGCGGCGGAGGTTCC |
| | | GGGGGTGGAGGCTCAGGAGGAGGGGGGTCCGACATCGTCATGACTCAG |
| | | TCGCCCTCAAGCGTCAGCGCGTCCGTCGGGGACAGAGTGATCATCACC |
| | | TGTCGGGCGTCCCAGGGAATTCGCAACTGGCTGGCCTGGTATCAGCAG |
| | | AAGCCCGGAAAGGCCCCCAACCTGTTGATCTACGCCGCCTCAAACCTC |
| | | CAATCCGGGGTGCCGAGCCGCTTCAGCGGCTCCGGTTCGGGTGCCGAT |
| | | TTCACTCTGACCATCTCCTCCCTGCAACCTGAAGATGTGGCTACCTAC |
| | | TACTGCCAAAAGTACAACTCCGCACCTTTTACTTTCGGACCGGGGACC |
| | | AAAGTGGACATTAAG |
| 149367-aa | 1089 | QVQLQESGPGLVKPSQTLSLTCTVSGGSISSGGYYWSWIRQHPGKGLE |
| VH | | WIGYIYYSGSTYYNPSLKSRVTISVDTSKNQFSLKLSSVTAADTAVYY |
| | | CARAGIAARLRGAFDIWGQGTMVTVSS |
| 149367-aa | 1090 | DIVMTQSPSSVSASVGDRVIITCRASQGIRNWLAWYQQKPGKAPNLLI |
| VL | | YAASNLQSGVPSRFSGSGSGADFTLTISSLQPEDVATYYCQKYNSAPF |
| | | TFGPGTKVDIK |
| 149367-aa | 1091 | MALPVTALLLPLALLLHAARPQVQLQESGPGLVKPSQTLSLTCTVSGG |
| Full CAR | | SISSGGYYWSWIRQHPGKGLEWIGYIYYSGSTYYNPSLKSRVTISVDT |
| | | SKNQFSLKLSSVTAADTAVYYCARAGIAARLRGAFDIWGQGTMVTVSS |
| | | GGGGSGGGGSGGGGSDIVMTQSPSSVSASVGDRVIITCRASQGIRNWL |
| | | AWYQQKPGKAPNLLIYAASNLQSGVPSRFSGSGSGADFTLTISSLQPE |
| | | DVATYYCQKYNSAPFTFGPGTKVDIKTTTPAPRPPTPAPTIASQPLSL |
| | | RPEACRPAAGGAVHTRGLDFACDIYIWAPLAGTCGVLLLSLVITLYCK |
| | | RGRKKLLYIFKQPFMRPVQTTQEEDGCSCRFPEEEEGGCELRVKFSRS |
| | | ADAPAYKQGQNQLYNELNLGRREEYDVLDKRRGRDPEMGGKPRRKNPQ |
| | | EGLYNELQKDKMAEAYSEIGMKGERRRGKGHDGLYQGLSTATKDTYDA |
| | | LHMQALPPR |
| 149367-nt | 1092 | ATGGCCCTCCCTGTCACCGCCCTGCTGCTTCCGCTGGCTCTTCTGCTC |
| Full CAR | | CACGCCGCTCGGCCCCAAGTGCAGCTTCAGGAGAGCGGCCCGGGACTC |
| | | GTGAAGCCGTCCCAGACCCTGTCCCTGACTTGCACCGTGTCGGGAGGA |
| | | AGCATCTCGAGCGGAGGCTACTATTGGTCGTGGATTCGGCAGCACCCT |
| | | GGAAAGGGCCTGGAATGGATCGGCTACATCTACTACTCCGGCTCGACC |
| | | TACTACAACCCATCGCTGAAGTCCAGAGTGACAATCTCAGTGGACACG |
| | | TCCAAGAATCAGTTCAGCCTGAAGCTCTCTTCCGTGACTGCGGCCGAC |
| | | ACCGCCGTGTACTACTGCGCACGCGCTGGAATTGCCGCCCGGCTGAGG |
| | | GGTGCCTTCGACATTTGGGGACAGGGCACCATGGTCACCGTGTCCTCC |
| | | GGCGGCGGAGGTTCCGGGGGTGGAGGCTCAGGAGGAGGGGGGTCCGAC |
| | | ATCGTCATGACTCAGTCGCCCTCAAGCGTCAGCGCGTCCGTCGGGGAC |
| | | AGAGTGATCATCACCTGTCGGGCGTCCCAGGGAATTCGCAACTGGCTG |
| | | GCCTGGTATCAGCAGAAGCCCGGAAAGGCCCCCAACCTGTTGATCTAC |
| | | GCCGCCTCAAACCTCCAATCCGGGGTGCCGAGCCGCTTCAGCGGCTCC |
| | | GGTTCGGGTGCCGATTTCACTCTGACCATCTCCTCCCTGCAACCTGAA |
| | | GATGTGGCTACCTACTACTGCCAAAAGTACAACTCCGCACCTTTTACT |
| | | TTCGGACCGGGGACCAAAGTGGACATTAAGACCACTACCCCAGCACCG |
| | | AGGCCACCCACCCCGGCTCCTACCATCGCCTCCCAGCCTCTGTCCCTG |
| | | CGTCCGGAGGCATGTAGACCCGCAGCTGGTGGGGCCGTGCATACCCGG |
| | | GGTCTTGACTTCGCCTGCGATATCTACATTTGGGCCCCTCTGGCTGGT |
| | | ACTTGCGGGGTCCTGCTGCTTTCACTCGTGATCACTCTTTACTGTAAG |
| | | CGCGGTCGGAAGAAGCTGCTGTACATCTTTAAGCAACCCTTCATGAGG |
| | | CCTGTGCAGACTACTCAAGAGGAGGACGGCTGTTCATGCCGGTTCCCA |
| | | GAGGAGGAGGAAGGCGGCTGCGAACTGCGCGTGAAATTCAGCCGCAGC |
| | | GCAGATGCTCCAGCCTACAAGCAGGGGCAGAACCAGCTCTACAACGAA |
| | | CTCAATCTTGGTCGGAGAGAGGAGTACGACGTGCTGGACAAGCGGAGA |
| | | GGACGGGACCCAGAAATGGGCGGGAAGCCGCGCAGAAAGAATCCCCAA |
| | | GAGGGCCTGTACAACGAGCTCCAAAAGGATAAGATGGCAGAAGCCTAT |
| | | AGCGAGATTGGTATGAAAGGGGAACGCAGAAGAGGCAAAGGCCACGAC |
| | | GGACTGTACCAGGGACTCAGCACCGCCACCAAGGACACCTATGACGCT |
| | | CTTCACATGCAGGCCCTGCCGCCTCGG |

149368

| | | |
|---|---|---|
| 149368-aa | 1093 | QVQLVQSGAEVKKPGSSVKVSCKASGGTFSSYAISWVRQAPGQGLEWM |
| ScFv domain | | GGIIPIFGTANYAQKFQGRVTITADESTSTAYMELSSLRSEDTAVYYC |
| | | ARRGGYQLLRWDVGLLRSAFDIWGQGTMVTVSSGGGGSGGGGSGGGGS |
| | | SYVLTQPPSVSVAPGQTARITCGGNNIGSKSVHWYQQKPGQAPVLVLY |
| | | GKNNRPSGVPDRFSGSRSGTTASLTITGAQAEDEADYYCSSRDSSGDH |
| | | LRVFGTGTKVTVL |
| 149368-nt | 1094 | CAAGTGCAGCTGGTCCAGTCGGGCGCCGAGGTCAAGAAGCCCGGGAGC |
| ScFv domain | | TCTGTGAAAGTGTCCTGCAAGGCCTCCGGGGGCACCTTTAGCTCCTAC |
| | | GCCATCTCCTGGGTCCGCCAAGCACCGGGTCAAGGCCTGGAGTGGATG |
| | | GGGGGAATTATCCCTATCTTCGGCACTGCCAACTACGCCCAGAAGTTC |
| | | CAGGGACGCGTGACCATTACCGCGGACGAATCCACCTCCACCGCTTAT |
| | | ATGGAGCTGTCCAGCTTGCGCTCGGAAGATACCGCCGTGTACTACTGC |
| | | GCCCGGAGGGGTGGATACCAGCTGCTGAGATGGGACGTGGGCCTCCTG |
| | | CGGTCGGCGTTCGACATCTGGGGCCAGGGCACTATGGTCACTGTGTCC |
| | | AGCGGAGGAGGCGGATCGGGAGGCGGCGGATCAGGGGGAGGCGGTTCC |
| | | AGCTACGTGCTTACTCAACCCCCTTCGGTGTCCGTGGCCCCGGGACAG |
| | | ACCGCCAGAATCACTTGCGGAGGAAACAACATTGGGTCCAAGAGCGTG |
| | | CATTGGTACCAGCAGAAGCCAGGACAGGCCCCTGTGCTGGTGCTCTAC |
| | | GGGAAGAACAATCGGCCCAGCGGAGTGCCGGACAGGTTCTCGGGTTCA |
| | | CGCTCCGGTACAACCGCTTCACTGACTATCACCGGGGCCCAGGCAGAG |
| | | GATGAAGCGGACTACTACTGTTCCTCCCGGGATTCATCCGGCGACCAC |
| | | CTCCGGGTGTTCGGAACCGGAACGAAGGTCACCGTGCTG |
| 149368-aa | 1095 | QVQLVQSGAEVKKPGSSVKVSCKASGGTFSSYAISWVRQAPGQGLEWM |
| VH | | GGIIPIFGTANYAQKFQGRVTITADESTSTAYMELSSLRSEDTAVYYC |
| | | ARRGGYQLLRWDVGLLRSAFDIWGQGTMVTVSS |
| 149368-aa | 1096 | SYVLTQPPSVSVAPGQTARITCGGNNIGSKSVHWYQQKPGQAPVLVLY |
| VL | | GKNNRPSGVPDRFSGSRSGTTASLTITGAQAEDEADYYCSSRDSSGDH |
| | | LRVFGTGTKVTVL |
| 149368-aa | 1097 | MALPVTALLLPLALLLHAARPQVQLVQSGAEVKKPGSSVKVSCKASGG |
| Full CAR | | TFSSYAISWVRQAPGQGLEWMGGIIPIFGTANYAQKFQGRVTITADES |
| | | TSTAYMELSSLRSEDTAVYYCARRGGYQLLRWDVGLLRSAFDIWGQGT |
| | | MVTVSSGGGGSGGGGSGGGGSSYVLTQPPSVSVAPGQTARITCGGNNI |
| | | GSKSVHWYQQKPGQAPVLVLYGKNNRPSGVPDRFSGSRSGTTASLTIT |
| | | GAQAEDEADYYCSSRDSSGDHLRVFGTGTKVTVLTTTPAPRPPTPAPT |
| | | IASQPLSLRPEACRPAAGGAVHTRGLDFACDIYIWAPLAGTCGVLLLS |
| | | LVITLYCKRGRKKLLYIFKQPFMRPVQTTQEEDGCSCRFPEEEEGGCE |
| | | LRVKFSRSADAPAYKQGQNQLYNELNLGRREEYDVLDKRRGRDPEMGG |
| | | KPRRKNPQEGLYNELQKDKMAEAYSEIGMKGERRRGKGHDGLYQGLST |
| | | ATKDTYDALHMQALPPR |
| 149368-nt | 1098 | ATGGCCCTCCCTGTCACCGCCCTGCTGCTTCCGCTGGCTCTTCTGCTC |
| Full CAR | | CACGCCGCTCGGCCCCAAGTGCAGCTGGTCCAGTCGGGCGCCGAGGTC |
| | | AAGAAGCCCGGGAGCTCTGTGAAAGTGTCCTGCAAGGCCTCCGGGGGC |
| | | ACCTTTAGCTCCTACGCCATCTCCTGGGTCCGCCAAGCACCGGGTCAA |
| | | GGCCTGGAGTGGATGGGGGGAATTATCCCTATCTTCGGCACTGCCAAC |
| | | TACGCCCAGAAGTTCCAGGGACGCGTGACCATTACCGCGGACGAATCC |
| | | ACCTCCACCGCTTATATGGAGCTGTCCAGCTTGCGCTCGGAAGATACC |
| | | GCCGTGTACTACTGCGCCCGGAGGGGTGGATACCAGCTGCTGAGATGG |
| | | GACGTGGGCCTCCTGCGGTCGGCGTTCGACATCTGGGGCCAGGGCACT |
| | | ATGGTCACTGTGTCCAGCGGAGGAGGCGGATCGGGAGGCGGCGGATCA |
| | | GGGGGAGGCGGTTCCAGCTACGTGCTTACTCAACCCCCTTCGGTGTCC |
| | | GTGGCCCCGGGACAGACCGCCAGAATCACTTGCGGAGGAAACAACATT |
| | | GGGTCCAAGAGCGTGCATTGGTACCAGCAGAAGCCAGGACAGGCCCCT |
| | | GTGCTGGTGCTCTACGGGAAGAACAATCGGCCCAGCGGAGTGCCGGAC |
| | | AGGTTCTCGGGTTCACGCTCCGGTACAACCGCTTCACTGACTATCACC |
| | | GGGGCCCAGGCAGAGGATGAAGCGGACTACTACTGTTCCTCCCGGGAT |
| | | TCATCCGGCGACCACCTCCGGGTGTTCGGAACCGGAACGAAGGTCACC |
| | | GTGCTGACCACTACCCCAGCACCGAGGCCACCCACCCCGGCTCCTACC |
| | | ATCGCCTCCCAGCCTCTGTCCCTGCGTCCGGAGGCATGTAGACCCGCA |
| | | GCTGGTGGGGCCGTGCATACCCGGGGTCTTGACTTCGCCTGCGATATC |
| | | TACATTTGGGCCCCTCTGGCTGGTACTTGCGGGGTCCTGCTGCTTTCA |
| | | CTCGTGATCACTCTTTACTGTAAGCGCGGTCGGAAGAAGCTGCTGTAC |
| | | ATCTTTAAGCAACCCTTCATGAGGCCTGTGCAGACTACTCAAGAGGAG |
| | | GACGGCTGTTCATGCCGGTTCCCAGAGGAGGAGGAAGGCGGCTGCGAA |
| | | CTGCGCGTGAAATTCAGCCGCAGCGCAGATGCTCCAGCCTACAAGCAG |
| | | GGGCAGAACCAGCTCTACAACGAACTCAATCTTGGTCGGAGAGAGGAG |
| | | TACGACGTGCTGGACAAGCGGAGAGGACGGGACCCAGAAATGGGCGGG |
| | | AAGCCGCGCAGAAAGAATCCCCAAGAGGGCCTGTACAACGAGCTCCAA |
| | | AAGGATAAGATGGCAGAAGCCTATAGCGAGATTGGTATGAAAGGGGAA |
| | | CGCAGAAGAGGCAAAGGCCACGACGGACTGTACCAGGGACTCAGCACC |
| | | GCCACCAAGGACACCTATGACGCTCTTCACATGCAGGCCCTGCCGCCT |
| | | CGG |

149369

| | | |
|---|---|---|
| 149369-aa | 1099 | EVQLQQSGPGLVKPSQTLSLTCAISGDSVSSNSAAWNWIRQSPSRGLE |
| ScFv domain | | WLGRTYYRSKWYSFYAISLKSRIIINPDTSKNQFSLQLKSVTPEDTAV |
| | | YYCARSSPEGLFLYWFDPWGQGTLVTVSSGGDGSGGGGSGGGGSSSEL |
| | | TQDPAVSVALGQTIRITCQGDSLGNYYATWYQQKPGQAPVLVIYGTNN |
| | | RPSGIPDRFSASSSGNTASLTITGAQAEDEADYYCNSRDSSGHHLLFG |
| | | TGTKVTVL |
| 149369-nt | 1100 | GAAGTGCAGCTCCAACAGTCAGGACCGGGGCTCGTGAAGCCATCCCAG |
| ScFv domain | | ACCCTGTCCCTGACTTGTGCCATCTCGGGAGATAGCGTGTCATCGAAC |
| | | TCCGCCGCCTGGAACTGGATTCGGCAGAGCCCGTCCCGCGGACTGGAG |
| | | TGGCTTGGAAGGACCTACTACCGGTCCAAGTGGTACTCTTTCTACGCG |
| | | ATCTCGCTGAAGTCCCGCATTATCATTAACCCTGATACCTCCAAGAAT |
| | | CAGTTCTCCCTCCAACTGAAATCCGTCACCCCCGAGGACACAGCAGTG |
| | | TATTACTGCGCACGGAGCAGCCCCGAAGGACTGTTCCTGTATTGGTTT |
| | | GACCCCTGGGGCCAGGGGACTCTTGTGACCGTGTCGAGCGGCGGAGAT |
| | | GGGTCCGGTGGCGGTGGTTCGGGGGGCGGCGGATCATCATCCGAACTG |
| | | ACCCAGGACCCGGCTGTGTCCGTGGCGCTGGGACAAACCATCCGCATT |
| | | ACGTGCCAGGGAGACTCCCTGGGCAACTACTACGCCACTTGGTACCAG |
| | | CAGAAGCCGGGCCAAGCCCCTGTGTTGGTCATCTACGGGACCAACAAC |
| | | AGACCTTCCGGCATCCCCGACCGGTTCAGCGCTTCGTCCTCCGGCAAC |
| | | ACTGCCAGCCTGACCATCACTGGAGCGCAGGCCGAAGATGAGGCCGAC |
| | | TACTACTGCAACAGCAGAGACTCCTCGGGTCATCACCTCTTGTTCGGA |
| | | ACTGGAACCAAGGTCACCGTGCTG |
| 149369-aa | 1101 | EVQLQQSGPGLVKPSQTLSLTCAISGDSVSSNSAAWNWIRQSPSRGLE |
| VH | | WLGRTYYRSKWYSFYAISLKSRIIINPDTSKNQFSLQLKSVTPEDTAV |
| | | YYCARSSPEGLFLYWFDPWGQGTLVTVSS |
| 149369-aa | 1102 | SSELTQDPAVSVALGQTIRITCQGDSLGNYYATWYQQKPGQAPVLVIY |
| VL | | GTNNRPSGIPDRFSASSSGNTASLTITGAQAEDEADYYCNSRDSSGHH |
| | | LLFGTGTKVTVL |
| 149369-aa | 1103 | MALPVTALLLPLALLLHAARPEVQLQQSGPGLVKPSQTLSLTCAISGD |
| Full CAR | | SVSSNSAAWNWIRQSPSRGLEWLGRTYYRSKWYSFYAISLKSRIIINP |
| | | DTSKNQFSLQLKSVTPEDTAVYYCARSSPEGLFLYWFDPWGQGTLVTV |
| | | SSGGDGSGGGGSGGGGSSSELTQDPAVSVALGQTIRITCQGDSLGNYY |
| | | ATWYQQKPGQAPVLVIYGTNNRPSGIPDRFSASSSGNTASLTITGAQA |
| | | EDEADYYCNSRDSSGHHLLFGTGTKVTVLTTTPAPRPPTPAPTIASQP |
| | | LSLRPEACRPAAGGAVHTRGLDFACDIYIWAPLAGTCGVLLLSLVITL |
| | | YCKRGRKKLLYIFKQPFMRPVQTTQEEDGCSCRFPEEEEGGCELRVKF |
| | | SRSADAPAYKQGQNQLYNELNLGRREEYDVLDKRRGRDPEMGGKPRRK |
| | | NPQEGLYNELQKDKMAEAYSEIGMKGERRRGKGHDGLYQGLSTATKDT |
| | | YDALHMQALPPR |
| 149369-nt | 1104 | ATGGCCCTCCCTGTCACCGCCCTGCTGCTTCCGCTGGCTCTTCTGCTC |
| Full CAR | | CACGCCGCTCGGCCCGAAGTGCAGCTCCAACAGTCAGGACCGGGGCTC |
| | | GTGAAGCCATCCCAGACCCTGTCCCTGACTTGTGCCATCTCGGGAGAT |
| | | AGCGTGTCATCGAACTCCGCCGCCTGGAACTGGATTCGGCAGAGCCCG |
| | | TCCCGCGGACTGGAGTGGCTTGGAAGGACCTACTACCGGTCCAAGTGG |
| | | TACTCTTTCTACGCGATCTCGCTGAAGTCCCGCATTATCATTAACCCT |
| | | GATACCTCCAAGAATCAGTTCTCCCTCCAACTGAAATCCGTCACCCCC |
| | | GAGGACACAGCAGTGTATTACTGCGCACGGAGCAGCCCCGAAGGACTG |
| | | TTCCTGTATTGGTTTGACCCCTGGGGCCAGGGGACTCTTGTGACCGTG |
| | | TCGAGCGGCGGAGATGGGTCCGGTGGCGGTGGTTCGGGGGGCGGCGGA |
| | | TCATCATCCGAACTGACCCAGGACCCGGCTGTGTCCGTGGCGCTGGGA |
| | | CAAACCATCCGCATTACGTGCCAGGGAGACTCCCTGGGCAACTACTAC |
| | | GCCACTTGGTACCAGCAGAAGCCGGGCCAAGCCCCTGTGTTGGTCATC |
| | | TACGGGACCAACAACAGACCTTCCGGCATCCCCGACCGGTTCAGCGCT |
| | | TCGTCCTCCGGCAACACTGCCAGCCTGACCATCACTGGAGCGCAGGCC |
| | | GAAGATGAGGCCGACTACTACTGCAACAGCAGAGACTCCTCGGGTCAT |
| | | CACCTCTTGTTCGGAACTGGAACCAAGGTCACCGTGCTGACCACTACC |
| | | CCAGCACCGAGGCCACCCACCCCGGCTCCTACCATCGCCTCCCAGCCT |
| | | CTGTCCCTGCGTCCGGAGGCATGTAGACCCGCAGCTGGTGGGGCCGTG |
| | | CATACCCGGGGTCTTGACTTCGCCTGCGATATCTACATTTGGGCCCCT |
| | | CTGGCTGGTACTTGCGGGGTCCTGCTGCTTTCACTCGTGATCACTCTT |
| | | TACTGTAAGCGCGGTCGGAAGAAGCTGCTGTACATCTTTAAGCAACCC |
| | | TTCATGAGGCCTGTGCAGACTACTCAAGAGGAGGACGGCTGTTCATGC |
| | | CGGTTCCCAGAGGAGGAGGAAGGCGGCTGCGAACTGCGCGTGAAATTC |
| | | AGCCGCAGCGCAGATGCTCCAGCCTACAAGCAGGGGCAGAACCAGCTC |
| | | TACAACGAACTCAATCTTGGTCGGAGAGAGGAGTACGACGTGCTGGAC |
| | | AAGCGGAGAGGACGGGACCCAGAAATGGGCGGGAAGCCGCGCAGAAAG |
| | | AATCCCCAAGAGGGCCTGTACAACGAGCTCCAAAAGGATAAGATGGCA |
| | | GAAGCCTATAGCGAGATTGGTATGAAAGGGGAACGCAGAAGAGGCAAA |
| | | GGCCACGACGGACTGTACCAGGGACTCAGCACCGCCACCAAGGACACC |
| | | TATGACGCTCTTCACATGCAGGCCCTGCCGCCTCGG |

BCMA_EBB-C1978-A4

| | | |
|---|---|---|
| BCMA_EBB- | 1105 | EVQLVESGGGLVQPGGSLRLSCAASGFTFSSYAMSWVRQAPGKGLEWV |
| C1978-A4- | | SAISGSGGSTYYADSVKGRFTISRDNSKNTLYLQMNSLRAEDTAVYYC |
| aa | | AKVEGSGSLDYWGQGTLVTVSSGGGGSGGGGSGGGGSEIVMTQSPGTL |
| ScFv domain | | SLSPGERATLSCRASQSVSSAYLAWYQQKPGQPPRLLISGASTRATGI |
| | | PDRFGGSGSGTDFTLTISRLEPEDFAVYYCQHYGSSFNGSSLFTFGQG |
| | | TRLEIK |
| BCMA_EBB- | 1106 | GAAGTGCAGCTCGTGGAGTCAGGAGGCGGCCTGGTCCAGCCGGGAGGG |
| C1978-A4- | | TCCCTTAGACTGTCATGCGCCGCAAGCGGATTCACTTTCTCCTCCTAT |
| nt | | GCCATGAGCTGGGTCCGCCAAGCCCCCGGAAAGGGACTGGAATGGGTG |
| ScFv domain | | TCCGCCATCTCGGGGTCTGGAGGCTCAACTTACTACGCTGACTCCGTG |
| | | AAGGGACGGTTCACCATTAGCCGCGACAACTCCAAGAACACCCTCTAC |
| | | CTCCAAATGAACTCCCTGCGGGCCGAGGATACCGCCGTCTACTACTGC |
| | | GCCAAAGTGGAAGGTTCAGGATCGCTGGACTACTGGGGACAGGGTACT |
| | | CTCGTGACCGTGTCATCGGGCGGAGGAGGTTCCGGCGGTGGCGGCTCC |
| | | GGCGGCGGAGGGTCGGAGATCGTGATGACCCAGAGCCCTGGTACTCTG |
| | | AGCCTTTCGCCGGGAGAAAGGGCCACCCTGTCCTGCCGCGCTTCCCAA |
| | | TCCGTGTCCTCCGCGTACTTGGCGTGGTACCAGCAGAAGCCGGGACAG |
| | | CCCCCTCGGCTGCTGATCAGCGGGGCCAGCACCCGGGCAACCGGAATC |
| | | CCAGACAGATTCGGGGGTTCCGGCAGCGGCACAGATTTCACCCTGACT |
| | | ATTTCGAGGTTGGAGCCCGAGGACTTTGCGGTGTATTACTGTCAGCAC |
| | | TACGGGTCGTCCTTTAATGGCTCCAGCCTGTTCACGTTCGGACAGGGG |
| | | ACCCGCCTGGAAATCAAG |
| BCMA_EBB- | 1107 | EVQLVESGGGLVQPGGSLRLSCAASGFTFSSYAMSWVRQAPGKGLEWV |
| C1978-A4- | | SAISGSGGSTYYADSVKGRFTISRDNSKNTLYLQMNSLRAEDTAVYYC |
| aa | | AKVEGSGSLDYWGQGTLVTVSS |
| VH | | |
| BCMA_EBB- | 1108 | EIVMTQSPGTLSLSPGERATLSCRASQSVSSAYLAWYQQKPGQPPRLL |
| C1978-A4- | | ISGASTRATGIPDRFGGSGSGTDFTLTISRLEPEDFAVYYCQHYGSSF |
| aa | | NGSSLFTFGQGTRLEIK |
| VL | | |
| BCMA_EBB- | 1109 | MALPVTALLLPLALLLHAARPEVQLVESGGGLVQPGGSLRLSCAASGF |
| C1978-A4- | | TFSSYAMSWVRQAPGKGLEWVSAISGSGGSTYYADSVKGRFTISRDNS |
| aa | | KNTLYLQMNSLRAEDTAVYYCAKVEGSGSLDYWGQGTLVTVSSGGGGS |
| Full CART | | GGGGSGGGGSEIVMTQSPGTLSLSPGERATLSCRASQSVSSAYLAWYQ |
| | | QKPGQPPRLLISGASTRATGIPDRFGGSGSGTDFTLTISRLEPEDFAV |
| | | YYCQHYGSSFNGSSLFTFGQGTRLEIKTTTPAPRPPTPAPTIASQPLS |
| | | LRPEACRPAAGGAVHTRGLDFACDIYIWAPLAGTCGVLLLSLVITLYC |
| | | KRGRKKLLYIFKQPFMRPVQTTQEEDGCSCRFPEEEEGGCELRVKFSR |
| | | SADAPAYKQGQNQLYNELNLGRREEYDVLDKRRGRDPEMGGKPRRKNP |
| | | QEGLYNELQKDKMAEAYSEIGMKGERRRGKGHDGLYQGLSTATKDTYD |
| | | ALHMQALPPR |
| BCMA_EBB- | 1110 | ATGGCCCTCCCTGTCACCGCCCTGCTGCTTCCGCTGGCTCTTCTGCTC |
| C1978-A4- | | CACGCCGCTCGGCCCGAAGTGCAGCTCGTGGAGTCAGGAGGCGGCCTG |
| nt | | GTCCAGCCGGGAGGGTCCCTTAGACTGTCATGCGCCGCAAGCGGATTC |
| Full CART | | ACTTTCTCCTCCTATGCCATGAGCTGGGTCCGCCAAGCCCCCGGAAAG |
| | | GGACTGGAATGGGTGTCCGCCATCTCGGGGTCTGGAGGCTCAACTTAC |
| | | TACGCTGACTCCGTGAAGGGACGGTTCACCATTAGCCGCGACAACTCC |
| | | AAGAACACCCTCTACCTCCAAATGAACTCCCTGCGGGCCGAGGATACC |
| | | GCCGTCTACTACTGCGCCAAAGTGGAAGGTTCAGGATCGCTGGACTAC |
| | | TGGGGACAGGGTACTCTCGTGACCGTGTCATCGGGCGGAGGAGGTTCC |
| | | GGCGGTGGCGGCTCCGGCGGCGGAGGGTCGGAGATCGTGATGACCCAG |
| | | AGCCCTGGTACTCTGAGCCTTTCGCCGGGAGAAAGGGCCACCCTGTCC |
| | | TGCCGCGCTTCCCAATCCGTGTCCTCCGCGTACTTGGCGTGGTACCAG |
| | | CAGAAGCCGGGACAGCCCCCTCGGCTGCTGATCAGCGGGGCCAGCACC |
| | | CGGGCAACCGGAATCCCAGACAGATTCGGGGGTTCCGGCAGCGGCACA |
| | | GATTTCACCCTGACTATTTCGAGGTTGGAGCCCGAGGACTTTGCGGTG |
| | | TATTACTGTCAGCACTACGGGTCGTCCTTTAATGGCTCCAGCCTGTTC |
| | | ACGTTCGGACAGGGGACCCGCCTGGAAATCAAGACCACTACCCCAGCA |
| | | CCGAGGCCACCCACCCCGGCTCCTACCATCGCCTCCCAGCCTCTGTCC |
| | | CTGCGTCCGGAGGCATGTAGACCCGCAGCTGGTGGGGCCGTGCATACC |
| | | CGGGGTCTTGACTTCGCCTGCGATATCTACATTTGGGCCCCTCTGGCT |
| | | GGTACTTGCGGGGTCCTGCTGCTTTCACTCGTGATCACTCTTTACTGT |
| | | AAGCGCGGTCGGAAGAAGCTGCTGTACATCTTTAAGCAACCCTTCATG |
| | | AGGCCTGTGCAGACTACTCAAGAGGAGGACGGCTGTTCATGCCGGTTC |
| | | CCAGAGGAGGAGGAAGGCGGCTGCGAACTGCGCGTGAAATTCAGCCGC |
| | | AGCGCAGATGCTCCAGCCTACAAGCAGGGGCAGAACCAGCTCTACAAC |
| | | GAACTCAATCTTGGTCGGAGAGAGGAGTACGACGTGCTGGACAAGCGG |
| | | AGAGGACGGGACCCAGAAATGGGCGGGAAGCCGCGCAGAAAGAATCCC |
| | | CAAGAGGGCCTGTACAACGAGCTCCAAAAGGATAAGATGGCAGAAGCC |
| | | TATAGCGAGATTGGTATGAAAGGGGAACGCAGAAGAGGCAAAGGCCAC |
| | | GACGGACTGTACCAGGGACTCAGCACCGCCACCAAGGACACCTATGAC |
| | | GCTCTTCACATGCAGGCCCTGCCGCCTCGG |

BCMA_EBB-C1978-G1

| | | |
|---|---|---|
| BCMA_EBB- | 1111 | EVQLVETGGGLVQPGGSLRLSCAASGITFSRYPMSWVRQAPGKGLEWVSGISD |
| C1978-G1- | | SGVSTYYADSAKGRFTISRDNSKNTLFLQMSSLRDEDTAVYYCVTRAGSEASDI |
| aa | | WGQGTMVTVSSGGGGSGGGGSGGGGSEIVLTQSPATLSLSPGERATLSCRAS |
| ScFv domain | | QSVSNSLAWYQQKPGQAPRLLIYDASSRATGIPDRFSGSGSGTDFTLTISRLEPE |
| | | DFAIYYCQQFGTSSGLTFGGGTKLEIK |
| BCMA_EBB- | 1112 | GAAGTGCAACTGGTGGAAACCGGTGGCGGCCTGGTGCAGCCTGGAGGA |
| C1978-G1- | | TCATTGAGGCTGTCATGCGCGGCCAGCGGTATTACCTTCTCCCGGTAC |
| nt | | CCCATGTCCTGGGTCAGACAGGCCCCGGGGAAAGGGCTTGAATGGGTG |
| ScFv domain | | TCCGGGATCTCGGACTCCGGTGTCAGCACTTACTACGCCGACTCCGCC |
| | | AAGGGACGCTTCACCATTTCCCGGGACAACTCGAAGAACACCCTGTTC |
| | | CTCCAAATGAGCTCCCTCCGGGACGAGGATACTGCAGTGTACTACTGC |
| | | GTGACCCGCGCCGGGTCCGAGGCGTCTGACATTTGGGGACAGGGCACT |
| | | ATGGTCACCGTGTCGTCCGGCGGAGGGGGCTCGGGAGGCGGTGGCAGC |
| | | GGAGGAGGAGGGTCCGAGATCGTGCTGACCCAATCCCCGGCCACCCTC |
| | | TCGCTGAGCCCTGGAGAAAGGGCAACCTTGTCCTGTCGCGCGAGCCAG |
| | | TCCGTGAGCAACTCCCTGGCCTGGTACCAGCAGAAGCCCGGACAGGCT |
| | | CCGAGACTTCTGATCTACGACGCTTCGAGCCGGGCCACTGGAATCCCC |
| | | GACCGCTTTTCGGGGTCCGGCTCAGGAACCGATTTCACCCTGACAATC |
| | | TCACGGCTGGAGCCAGAGGATTTCGCCATCTATTACTGCCAGCAGTTC |
| | | GGTACTTCCTCCGGCCTGACTTTCGGAGGCGGCACGAAGCTCGAAATC |
| | | AAG |
| BCMA_EBB- | 1113 | EVQLVETGGGLVQPGGSLRLSCAASGITFSRYPMSWVRQAPGKGLEWV |
| C1978-G1- | | SGISDSGVSTYYADSAKGRFTISRDNSKNTLFLQMSSLRDEDTAVYYC |
| aa | | VTRAGSEASDIWGQGTMVTVSS |
| VH | | |
| BCMA_EBB- | 1114 | EIVLTQSPATLSLSPGERATLSCRASQSVSNSLAWYQQKPGQAPRLLI |
| C1978-G1- | | YDASSRATGIPDRFSGSGSGTDFTLTISRLEPEDFAIYYCQQFGTSSG |
| aa | | LTFGGGTKLEIK |
| VL | | |
| BCMA_EBB- | 1115 | MALPVTALLLPLALLLHAARPEVQLVETGGGLVQPGGSLRLSCAASGITFSRYPM |
| C1978-G1- | | SWVRQAPGKGLEWVSGISDSGVSTYYADSAKGRFTISRDNSKNTLFLQMSSLR |
| aa | | DEDTAVYYCVTRAGSEASDIWGQGTMVTVSSGGGGSGGGGSGGGGSEIVLTQ |
| Full CART | | SPATLSLSPGERATLSCRASQSVSNSLAWYQQKPGQAPRLLIYDASSRATGIPDR |
| | | FSGSGSGTDFTLTISRLEPEDFAIYYCQQFGTSSGLTFGGGTKLEIKTTTPAPRPPT |
| | | PAPTIASQPLSLRPEACRPAAGGAVHTRGLDFACDIYIWAPLAGTCGVLLLSLVIT |
| | | LYCKRGRKKLLYIFKQPFMRPVQTTQEEDGCSCRFPEEEEGGCELRVKFSRSADA |
| | | PAYKQGQNQLYNELNLGRREEYDVLDKRRGRDPEMGGKPRRKNPQEGLYNEL |
| | | QKDKMAEAYSEIGMKGERRRGKGHDGLYQGLSTATKDTYDALHMQALPPR |
| BCMA_EBB- | 1116 | ATGGCCCTCCCTGTCACCGCCCTGCTGCTTCCGCTGGCTCTTCTGCTC |
| C1978-G1- | | CACGCCGCTCGGCCCGAAGTGCAACTGGTGGAAACCGGTGGCGGCCTG |
| nt | | GTGCAGCCTGGAGGATCATTGAGGCTGTCATGCGCGGCCAGCGGTATT |
| Full CART | | ACCTTCTCCCGGTACCCCATGTCCTGGGTCAGACAGGCCCCGGGGAAA |
| | | GGGCTTGAATGGGTGTCCGGGATCTCGGACTCCGGTGTCAGCACTTAC |
| | | TACGCCGACTCCGCCAAGGGACGCTTCACCATTTCCCGGGACAACTCG |
| | | AAGAACACCCTGTTCCTCCAAATGAGCTCCCTCCGGGACGAGGATACT |
| | | GCAGTGTACTACTGCGTGACCCGCGCCGGGTCCGAGGCGTCTGACATT |
| | | TGGGGACAGGGCACTATGGTCACCGTGTCGTCCGGCGGAGGGGGCTCG |
| | | GGAGGCGGTGGCAGCGGAGGAGGAGGGTCCGAGATCGTGCTGACCCAA |
| | | TCCCCGGCCACCCTCTCGCTGAGCCCTGGAGAAAGGGCAACCTTGTCC |
| | | TGTCGCGCGAGCCAGTCCGTGAGCAACTCCCTGGCCTGGTACCAGCAG |
| | | AAGCCCGGACAGGCTCCGAGACTTCTGATCTACGACGCTTCGAGCCGG |
| | | GCCACTGGAATCCCCGACCGCTTTTCGGGGTCCGGCTCAGGAACCGAT |
| | | TTCACCCTGACAATCTCACGGCTGGAGCCAGAGGATTTCGCCATCTAT |
| | | TACTGCCAGCAGTTCGGTACTTCCTCCGGCCTGACTTTCGGAGGCGGC |
| | | ACGAAGCTCGAAATCAAGACCACTACCCCAGCACCGAGGCCACCCACC |
| | | CCGGCTCCTACCATCGCCTCCCAGCCTCTGTCCCTGCGTCCGGAGGCA |
| | | TGTAGACCCGCAGCTGGTGGGGCCGTGCATACCCGGGGTCTTGACTTC |
| | | GCCTGCGATATCTACATTTGGGCCCCTCTGGCTGGTACTTGCGGGGTC |
| | | CTGCTGCTTTCACTCGTGATCACTCTTTACTGTAAGCGCGGTCGGAAG |
| | | AAGCTGCTGTACATCTTTAAGCAACCCTTCATGAGGCCTGTGCAGACT |
| | | ACTCAAGAGGAGGACGGCTGTTCATGCCGGTTCCCAGAGGAGGAGGAA |
| | | GGCGGCTGCGAACTGCGCGTGAAATTCAGCCGCAGCGCAGATGCTCCA |
| | | GCCTACAAGCAGGGGCAGAACCAGCTCTACAACGAACTCAATCTTGGT |
| | | CGGAGAGAGGAGTACGACGTGCTGGACAAGCGGAGAGGACGGGACCCA |
| | | GAAATGGGCGGGAAGCCGCGCAGAAAGAATCCCCAAGAGGGCCTGTAC |
| | | AACGAGCTCCAAAAGGATAAGATGGCAGAAGCCTATAGCGAGATTGGT |
| | | ATGAAAGGGGAACGCAGAAGAGGCAAAGGCCACGACGGACTGTACCAG |
| | | GGACTCAGCACCGCCACCAAGGACACCTATGACGCTCTTCACATGCAG |
| | | GCCCTGCCGCCTCGG |

BCMA_EBB-C1979-C1

| | | |
|---|---|---|
| BCMA_EBB- | 1117 | QVQLVESGGGLVQPGGSLRLSCAASGFTFSSYAMSWVRQAPGKGLEWV |
| C1979-C1- | | SAISGSGGSTYYADSVKGRFTISRDNAKNSLYLQMNSLRAEDTAIYYC |
| aa | | ARATYKRELRYYYGMDVWGQGTMVTVSSGGGGSGGGGSGGGGSEIVMT |
| ScFv domain | | QSPGTVSLSPGERATLSCRASQSVSSSFLAWYQQKPGQAPRLLIYGAS |
| | | SRATGIPDRFSGSGSGTDFTLTISRLEPEDSAVYYCQQYHSSPSWTFG |
| | | QGTRLEIK |
| BCMA_EBB- | 1118 | CAAGTGCAGCTCGTGGAATCGGGTGGCGGACTGGTGCAGCCGGGGGGC |
| C1979-C1-nt | | TCACTTAGACTGTCCTGCGCGGCCAGCGGATTCACTTTCTCCTCCTAC |
| ScFv domain | | GCCATGTCCTGGGTCAGACAGGCCCCTGGAAAGGGCCTGGAATGGGTG |
| | | TCCGCAATCAGCGGCAGCGGCGGCTCGACCTATTACGCGGATTCAGTG |
| | | AAGGGCAGATTCACCATTTCCCGGGACAACGCCAAGAACTCCTTGTAC |
| | | CTTCAAATGAACTCCCTCCGCGCGGAAGATACCGCAATCTACTACTGC |
| | | GCTCGGGCCACTTACAAGAGGGAACTGCGCTACTACTACGGGATGGAC |
| | | GTCTGGGGCCAGGGAACCATGGTCACCGTGTCCAGCGGAGGAGGAGGA |
| | | TCGGGAGGAGGCGGTAGCGGGGGTGGAGGGTCGGAGATCGTGATGACC |
| | | CAGTCCCCCGGCACTGTGTCGCTGTCCCCCGGCGAACGGGCCACCCTG |
| | | TCATGTCGGGCCAGCCAGTCAGTGTCGTCAAGCTTCCTCGCCTGGTAC |
| | | CAGCAGAAACCGGGACAAGCTCCCCGCCTGCTGATCTACGGAGCCAGC |
| | | AGCCGGGCCACCGGTATTCCTGACCGGTTCTCCGGTTCGGGGTCCGGG |
| | | ACCGACTTTACTCTGACTATCTCTCGCCTCGAGCCAGAGGACTCCGCC |
| | | GTGTATTACTGCCAGCAGTACCACTCCTCCCCGTCCTGGACGTTCGGA |
| | | CAGGGCACAAGGCTGGAGATTAAG |
| BCMA_EBB- | 1119 | QVQLVESGGGLVQPGGSLRLSCAASGFTFSSYAMSWVRQAPGKGLEWV |
| C1979-C1- | | SAISGSGGSTYYADSVKGRFTISRDNAKNSLYLQMNSLRAEDTAIYYC |
| aa | | ARATYKRELRYYYGMDVWGQGTMVTVSS |
| VH | | |
| BCMA_EBB- | 1120 | EIVMTQSPGTVSLSPGERATLSCRASQSVSSSFLAWYQQKPGQAPRLL |
| C1979-C1- | | IYGASSRATGIPDRFSGSGSGTDFTLTISRLEPEDSAVYYCQQYHSSP |
| aa | | SWTFGQGTRLEIK |
| VL | | |
| BCMA_EBB- | 1121 | MALPVTALLLPLALLLHAARPQVQLVESGGGLVQPGGSLRLSCAASGF |
| C1979-C1- | | TFSSYAMSWVRQAPGKGLEWVSAISGSGGSTYYADSVKGRFTISRDNA |
| aa | | KNSLYLQMNSLRAEDTAIYYCARATYKRELRYYYGMDVWGQGTMVTVS |
| Full CART | | SGGGGSGGGGSGGGGSEIVMTQSPGTVSLSPGERATLSCRASQSVSSS |
| | | FLAWYQQKPGQAPRLLIYGASSRATGIPDRFSGSGSGTDFTLTISRLE |
| | | PEDSAVYYCQQYHSSPSWTFGQGTRLEIKTTTPAPRPPTPAPTIASQP |
| | | LSLRPEACRPAAGGAVHTRGLDFACDIYIWAPLAGTCGVLLLSLVITL |
| | | YCKRGRKKLLYIFKQPFMRPVQTTQEEDGCSCRFPEEEEGGCELRVKF |
| | | SRSADAPAYKQGQNQLYNELNLGRREEYDVLDKRRGRDPEMGGKPRRK |
| | | NPQEGLYNELQKDKMAEAYSEIGMKGERRRGKGHDGLYQGLSTATKDT |
| | | YDALHMQALPPR |
| BCMA_EBB- | 1122 | ATGGCCCTCCCTGTCACCGCCCTGCTGCTTCCGCTGGCTCTTCTGCTC |
| C1979-C1-nt | | CACGCCGCTCGGCCCCAAGTGCAGCTCGTGGAATCGGGTGGCGGACTG |
| Full CART | | GTGCAGCCGGGGGGCTCACTTAGACTGTCCTGCGCGGCCAGCGGATTC |
| | | ACTTTCTCCTCCTACGCCATGTCCTGGGTCAGACAGGCCCCTGGAAAG |
| | | GGCCTGGAATGGGTGTCCGCAATCAGCGGCAGCGGCGGCTCGACCTAT |
| | | TACGCGGATTCAGTGAAGGGCAGATTCACCATTTCCCGGGACAACGCC |
| | | AAGAACTCCTTGTACCTTCAAATGAACTCCCTCCGCGCGGAAGATACC |
| | | GCAATCTACTACTGCGCTCGGGCCACTTACAAGAGGGAACTGCGCTAC |
| | | TACTACGGGATGGACGTCTGGGGCCAGGGAACCATGGTCACCGTGTCC |
| | | AGCGGAGGAGGAGGATCGGGAGGAGGCGGTAGCGGGGGTGGAGGGTCG |
| | | GAGATCGTGATGACCCAGTCCCCCGGCACTGTGTCGCTGTCCCCCGGC |
| | | GAACGGGCCACCCTGTCATGTCGGGCCAGCCAGTCAGTGTCGTCAAGC |
| | | TTCCTCGCCTGGTACCAGCAGAAACCGGGACAAGCTCCCCGCCTGCTG |
| | | ATCTACGGAGCCAGCAGCCGGGCCACCGGTATTCCTGACCGGTTCTCC |
| | | GGTTCGGGGTCCGGGACCGACTTTACTCTGACTATCTCTCGCCTCGAG |
| | | CCAGAGGACTCCGCCGTGTATTACTGCCAGCAGTACCACTCCTCCCCG |
| | | TCCTGGACGTTCGGACAGGGCACAAGGCTGGAGATTAAGACCACTACC |
| | | CCAGCACCGAGGCCACCCACCCCGGCTCCTACCATCGCCTCCCAGCCT |
| | | CTGTCCCTGCGTCCGGAGGCATGTAGACCCGCAGCTGGTGGGGCCGTG |
| | | CATACCCGGGGTCTTGACTTCGCCTGCGATATCTACATTTGGGCCCCT |
| | | CTGGCTGGTACTTGCGGGGTCCTGCTGCTTTCACTCGTGATCACTCTT |
| | | TACTGTAAGCGCGGTCGGAAGAAGCTGCTGTACATCTTTAAGCAACCC |
| | | TTCATGAGGCCTGTGCAGACTACTCAAGAGGAGGACGGCTGTTCATGC |
| | | CGGTTCCCAGAGGAGGAGGAAGGCGGCTGCGAACTGCGCGTGAAATTC |
| | | AGCCGCAGCGCAGATGCTCCAGCCTACAAGCAGGGGCAGAACCAGCTC |
| | | TACAACGAACTCAATCTTGGTCGGAGAGAGGAGTACGACGTGCTGGAC |
| | | AAGCGGAGAGGACGGGACCCAGAAATGGGCGGGAAGCCGCGCAGAAAG |
| | | AATCCCCAAGAGGGCCTGTACAACGAGCTCCAAAAGGATAAGATGGCA |
| | | GAAGCCTATAGCGAGATTGGTATGAAAGGGGAACGCAGAAGAGGCAAA |
| | | GGCCACGACGGACTGTACCAGGGACTCAGCACCGCCACCAAGGACACC |
| | | TATGACGCTCTTCACATGCAGGCCCTGCCGCCTCGG |

BCMA_EBB-C1978-C7

| | | |
|---|---|---|
| BCMA_EBB- | 1123 | EVQLVETGGGLVQPGGSLRLSCAASGFTFSSYAMSWVRQAPGKGLEWV |
| C1978-C7- | | SAISGSGGSTYYADSVKGRFTISRDNSKNTLYLQMNTLKAEDTAVYYC |
| aa | | ARATYKRELRYYYGMDVWGQGTTVTVSSGGGGSGGGGSGGGGSEIVLT |
| ScFv domain | | QSPSTLSLSPGESATLSCRASQSVSTTFLAWYQQKPGQAPRLLIYGSS |
| | | NRATGIPDRFSGSGSGTDFTLTIRRLEPEDFAVYYCQQYHSSPSWTFG |
| | | QGTKVEIK |
| BCMA_EBB- | 1124 | GAGGTGCAGCTTGTGGAAACCGGTGGCGGACTGGTGCAGCCCGGAGGA |
| C1978-C7-nt | | AGCCTCAGGCTGTCCTGCGCCGCGTCCGGCTTCACCTTCTCCTCGTAC |
| ScFv domain | | GCCATGTCCTGGGTCCGCCAGGCCCCCGGAAAGGGCCTGGAATGGGTG |
| | | TCCGCCATCTCTGGAAGCGGAGGTTCCACGTACTACGCGGACAGCGTC |
| | | AAGGGAAGGTTCACAATCTCCCGCGATAATTCGAAGAACACTCTGTAC |
| | | CTTCAAATGAACACCCTGAAGGCCGAGGACACTGCTGTGTACTACTGC |
| | | GCACGGGCCACCTACAAGAGAGAGCTCCGGTACTACTACGGAATGGAC |
| | | GTCTGGGGCCAGGGAACTACTGTGACCGTGTCCTCGGGAGGGGGTGGC |
| | | TCCGGGGGGGGCGGCTCCGGCGGAGGCGGTTCCGAGATTGTGCTGACC |
| | | CAGTCACCTTCAACTCTGTCGCTGTCCCCGGGAGAGAGCGCTACTCTG |
| | | AGCTGCCGGGCCAGCCAGTCCGTGTCCACCACCTTCCTCGCCTGGTAT |
| | | CAGCAGAAGCCGGGGCAGGCACCACGGCTCTTGATCTACGGGTCAAGC |
| | | AACAGAGCGACCGGAATTCCTGACCGCTTCTCGGGGAGCGGTTCAGGC |
| | | ACCGACTTCACCCTGACTATCCGGCGCCTGGAACCCGAAGATTTCGCC |
| | | GTGTATTACTGTCAACAGTACCACTCCTCGCCGTCCTGGACCTTTGGC |
| | | CAAGGAACCAAAGTGGAAATCAAG |
| BCMA_EBB- | 1125 | EVQLVETGGGLVQPGGSLRLSCAASGFTFSSYAMSWVRQAPGKGLEWV |
| C1978-C7- | | SAISGSGGSTYYADSVKGRFTISRDNSKNTLYLQMNTLKAEDTAVYYC |
| aa | | ARATYKRELRYYYGMDVWGQGTTVTVSS |
| VH | | |
| BCMA_EBB- | 1126 | EIVLTQSPSTLSLSPGESATLSCRASQSVSTTFLAWYQQKPGQAPRLL |
| C1978-C7- | | IYGSSNRATGIPDRFSGSGSGTDFTLTIRRLEPEDFAVYYCQQYHSSP |
| aa | | SWTFGQGTKVEIK |
| VL | | |
| BCMA_EBB- | 1127 | MALPVTALLLPLALLLHAARPEVQLVETGGGLVQPGGSLRLSCAASGF |
| C1978-C7- | | TFSSYAMSWVRQAPGKGLEWVSAISGSGGSTYYADSVKGRFTISRDNS |
| aa | | KNTLYLQMNTLKAEDTAVYYCARATYKRELRYYYGMDVWGQGTTVTVS |
| Full CART | | SGGGGSGGGGSGGGGSEIVLTQSPSTLSLSPGESATLSCRASQSVSTT |
| | | FLAWYQQKPGQAPRLLIYGSSNRATGIPDRFSGSGSGTDFTLTIRRLE |
| | | PEDFAVYYCQQYHSSPSWTFGQGTKVEIKTTTPAPRPPTPAPTIASQP |
| | | LSLRPEACRPAAGGAVHTRGLDFACDIYIWAPLAGTCGVLLLSLVITL |
| | | YCKRGRKKLLYIFKQPFMRPVQTTQEEDGCSCRFPEEEEGGCELRVKF |
| | | SRSADAPAYKQGQNQLYNELNLGRREEYDVLDKRRGRDPEMGGKPRRK |
| | | NPQEGLYNELQKDKMAEAYSEIGMKGERRRGKGHDGLYQGLSTATKDT |
| | | YDALHMQALPPR |
| BCMA_EBB- | 1128 | ATGGCCCTCCCTGTCACCGCCCTGCTGCTTCCGCTGGCTCTTCTGCTC |
| C1978-C7-nt | | CACGCCGCTCGGCCCGAGGTGCAGCTTGTGGAAACCGGTGGCGGACTG |
| Full CAR | | GTGCAGCCCGGAGGAAGCCTCAGGCTGTCCTGCGCCGCGTCCGGCTTC |
| | | TACCTTCTCCTCGTACGCCATGTCCTGGGTCCGCCAGGCCCCCGGAAAG |
| | | GGCCTGGAATGGGTGTCCGCCATCTCTGGAAGCGGAGGTTCCACGTAC |
| | | TACGCGGACAGCGTCAAGGGAAGGTTCACAATCTCCCGCGATAATTCG |
| | | AAGAACACTCTGTACCTTCAAATGAACACCCTGAAGGCCGAGGACACT |
| | | GCTGTGTACTACTGCGCACGGGCCACCTACAAGAGAGAGCTCCGGTAC |
| | | TACTACGGAATGGACGTCTGGGGCCAGGGAACTACTGTGACCGTGTCC |
| | | TCGGGAGGGGGTGGCTCCGGGGGGGGCGGCTCCGGCGGAGGCGGTTCC |
| | | GAGATTGTGCTGACCCAGTCACCTTCAACTCTGTCGCTGTCCCCGGGA |
| | | GAGAGCGCTACTCTGAGCTGCCGGGCCAGCCAGTCCGTGTCCACCACC |
| | | TTCCTCGCCTGGTATCAGCAGAAGCCGGGGCAGGCACCACGGCTCTTG |
| | | ATCTACGGGTCAAGCAACAGAGCGACCGGAATTCCTGACCGCTTCTCG |
| | | GGGAGCGGTTCAGGCACCGACTTCACCCTGACTATCCGGCGCCTGGAA |
| | | CCCGAAGATTTCGCCGTGTATTACTGTCAACAGTACCACTCCTCGCCG |
| | | TCCTGGACCTTTGGCCAAGGAACCAAAGTGGAAATCAAGACCACTACC |
| | | CCAGCACCGAGGCCACCCACCCCGGCTCCTACCATCGCCTCCCAGCCT |
| | | CTGTCCCTGCGTCCGGAGGCATGTAGACCCGCAGCTGGTGGGGCCGTG |
| | | CATACCCGGGGTCTTGACTTCGCCTGCGATATCTACATTTGGGCCCCT |
| | | CTGGCTGGTACTTGCGGGGTCCTGCTGCTTTCACTCGTGATCACTCTT |
| | | TACTGTAAGCGCGGTCGGAAGAAGCTGCTGTACATCTTTAAGCAACCC |
| | | TTCATGAGGCCTGTGCAGACTACTCAAGAGGAGGACGGCTGTTCATGC |
| | | CGGTTCCCAGAGGAGGAGGAAGGCGGCTGCGAACTGCGCGTGAAATTC |
| | | AGCCGCAGCGCAGATGCTCCAGCCTACAAGCAGGGGCAGAACCAGCTC |
| | | TACAACGAACTCAATCTTGGTCGGAGAGAGGAGTACGACGTGCTGGAC |
| | | AAGCGGAGAGGACGGGACCCAGAAATGGGCGGGAAGCCGCGCAGAAAG |
| | | AATCCCCAAGAGGGCCTGTACAACGAGCTCCAAAAGGATAAGATGGCA |
| | | GAAGCCTATAGCGAGATTGGTATGAAAGGGGAACGCAGAAGAGGCAAA |
| | | GGCCACGACGGACTGTACCAGGGACTCAGCACCGCCACCAAGGACACC |
| | | TATGACGCTCTTCACATGCAGGCCCTGCCGCCTCGG |

BCMA_EBB-C1978-D10

| | | |
|---|---|---|
| BCMA_EBB- | 1129 | EVQLVETGGGLVQPGRSLRLSCAASGFTFDDYAMHWVRQAPGKGLEWV |
| C1978-D10- | | SGISWNSGSIGYADSVKGRFTISRDNAKNSLYLQMNSLRDEDTAVYYC |
| aa | | ARVGKAVPDVWGQGTTVTVSSGGGGSGGGGSGGGGSDIVMTQTPSSLS |
| ScFv domain | | ASVGDRVTITCRASQSISSYLNWYQQKPGKAPKLLIYAASSLQSGVPS |
| | | RFSGSGSGTDFTLTISSLQPEDFATYYCQQSYSTPYSFGQGTRLEIK |
| BCMA_EBB- | 1130 | GAAGTGCAGCTCGTGGAAACTGGAGGTGGACTCGTGCAGCCTGGACGG |
| C1978-D10- | | TCGCTGCGGCTGAGCTGCGCTGCATCCGGCTTCACCTTCGACGATTAT |
| nt | | GCCATGCACTGGGTCAGACAGGCGCCAGGGAAGGGACTTGAGTGGGTG |
| ScFv domain | | TCCGGTATCAGCTGGAATAGCGGCTCAATCGGATACGCGGACTCCGTG |
| | | AAGGGAAGGTTCACCATTTCCCGCGACAACGCCAAGAACTCCCTGTAC |
| | | TTGCAAATGAACAGCCTCCGGGATGAGGACACTGCCGTGTACTACTGC |
| | | GCCCGCGTCGGAAAAGCTGTGCCCGACGTCTGGGGCCAGGGAACCACT |
| | | GTGACCGTGTCCAGCGGCGGGGGTGGATCGGGCGGTGGAGGGTCCGGT |
| | | GGAGGGGGCTCAGATATTGTGATGACCCAGACCCCCTCGTCCCTGTCC |
| | | GCCTCGGTCGGCGACCGCGTGACTATCACATGTAGAGCCTCGCAGAGC |
| | | ATCTCCAGCTACCTGAACTGGTATCAGCAGAAGCCGGGGAAGGCCCCG |
| | | AAGCTCCTGATCTACGCGGCATCATCACTGCAATCGGGAGTGCCGAGC |
| | | CGGTTTTCCGGGTCCGGCTCCGGCACCGACTTCACGCTGACCATTTCT |
| | | TCCCTGCAACCCGAGGACTTCGCCACTTACTACTGCCAGCAGTCCTAC |
| | | TCCACCCCTTACTCCTTCGGCCAAGGAACCAGGCTGGAAATCAAG |
| BCMA_EBB- | 1131 | EVQLVETGGGLVQPGRSLRLSCAASGFTFDDYAMHWVRQAPGKGLEWV |
| C1978-D10- | | SGISWNSGSIGYADSVKGRFTISRDNAKNSLYLQMNSLRDEDTAVYYC |
| aa | | ARVGKAVPDVWGQGTTVTVSS |
| VH | | |
| BCMA_EBB- | 1132 | DIVMTQTPSSLSASVGDRVTITCRASQSISSYLNWYQQKPGKAPKLLI |
| C1978-D10- | | YAASSLQSGVPSRFSGSGSGTDFTLTISSLQPEDFATYYCQQSYSTPY |
| aa | | SFGQGTRLEIK |
| VL | | |
| BCMA_EBB- | 1133 | MALPVTALLLPLALLLHAARPEVQLVETGGGLVQPGRSLRLSCAASGF |
| C1978-D10- | | TFDDYAMHWVRQAPGKGLEWVSGISWNSGSIGYADSVKGRFTISRDNA |
| aa | | KNSLYLQMNSLRDEDTAVYYCARVGKAVPDVWGQGTTVTVSSGGGGSG |
| Full CART | | GGGSGGGGSDIVMTQTPSSLSASVGDRVTITCRASQSISSYLNWYQQK |
| | | PGKAPKLLIYAASSLQSGVPSRFSGSGSGTDFTLTISSLQPEDFATYY |
| | | CQQSYSTPYSFGQGTRLEIKTTTPAPRPPTPAPTIASQPLSLRPEACR |
| | | PAAGGAVHTRGLDFACDIYIWAPLAGTCGVLLLSLVITLYCKRGRKKL |
| | | LYIFKQPFMRPVQTTQEEDGCSCRFPEEEEGGCELRVKFSRSADAPAY |
| | | KQGQNQLYNELNLGRREEYDVLDKRRGRDPEMGGKPRRKNPQEGLYNE |
| | | LQKDKMAEAYSEIGMKGERRRGKGHDGLYQGLSTATKDTYDALHMQAL |
| | | PPR |
| BCMA_EBB- | 1134 | ATGGCCCTCCCTGTCACCGCCCTGCTGCTTCCGCTGGCTCTTCTGCTC |
| C1978-D10- | | CACGCCGCTCGGCCCGAAGTGCAGCTCGTGGAAACTGGAGGTGGACTC |
| nt | | GTGCAGCCTGGACGGTCGCTGCGGCTGAGCTGCGCTGCATCCGGCTTC |
| Full CART | | ACCTTCGACGATTATGCCATGCACTGGGTCAGACAGGCGCCAGGGAAG |
| | | GGACTTGAGTGGGTGTCCGGTATCAGCTGGAATAGCGGCTCAATCGGA |
| | | TACGCGGACTCCGTGAAGGGAAGGTTCACCATTTCCCGCGACAACGCC |
| | | AAGAACTCCCTGTACTTGCAAATGAACAGCCTCCGGGATGAGGACACT |
| | | GCCGTGTACTACTGCGCCCGCGTCGGAAAAGCTGTGCCCGACGTCTGG |
| | | GGCCAGGGAACCACTGTGACCGTGTCCAGCGGCGGGGGTGGATCGGGC |
| | | GGTGGAGGGTCCGGTGGAGGGGGCTCAGATATTGTGATGACCCAGACC |
| | | CCCTCGTCCCTGTCCGCCTCGGTCGGCGACCGCGTGACTATCACATGT |
| | | AGAGCCTCGCAGAGCATCTCCAGCTACCTGAACTGGTATCAGCAGAAG |
| | | CCGGGGAAGGCCCCGAAGCTCCTGATCTACGCGGCATCATCACTGCAA |
| | | TCGGGAGTGCCGAGCCGGTTTTCCGGGTCCGGCTCCGGCACCGACTTC |
| | | ACGCTGACCATTTCTTCCCTGCAACCCGAGGACTTCGCCACTTACTAC |
| | | TGCCAGCAGTCCTACTCCACCCCTTACTCCTTCGGCCAAGGAACCAGG |
| | | CTGGAAATCAAGACCACTACCCCAGCACCGAGGCCACCCACCCCGGCT |
| | | CCTACCATCGCCTCCCAGCCTCTGTCCCTGCGTCCGGAGGCATGTAGA |
| | | CCCGCAGCTGGTGGGGCCGTGCATACCCGGGGTCTTGACTTCGCCTGC |
| | | GATATCTACATTTGGGCCCCTCTGGCTGGTACTTGCGGGGTCCTGCTG |
| | | CTTTCACTCGTGATCACTCTTTACTGTAAGCGCGGTCGGAAGAAGCTG |
| | | CTGTACATCTTTAAGCAACCCTTCATGAGGCCTGTGCAGACTACTCAA |
| | | GAGGAGGACGGCTGTTCATGCCGGTTCCCAGAGGAGGAGGAAGGCGGC |
| | | TGCGAACTGCGCGTGAAATTCAGCCGCAGCGCAGATGCTCCAGCCTAC |
| | | AAGCAGGGGCAGAACCAGCTCTACAACGAACTCAATCTTGGTCGGAGA |
| | | GAGGAGTACGACGTGCTGGACAAGCGGAGAGGACGGGACCCAGAAATG |
| | | GGCGGGAAGCCGCGCAGAAAGAATCCCCAAGAGGGCCTGTACAACGAG |
| | | CTCCAAAAGGATAAGATGGCAGAAGCCTATAGCGAGATTGGTATGAAA |
| | | GGGGAACGCAGAAGAGGCAAAGGCCACGACGGACTGTACCAGGGACTC |
| | | AGCACCGCCACCAAGGACACCTATGACGCTCTTCACATGCAGGCCCTG |
| | | CCGCCTCGG |

BCMA_EBB-C1979-C12

| | | |
|---|---|---|
| BCMA_EBB- | 1135 | EVQLVESGGGLVQPGRSLRLSCTASGFTFDDYAMHWVRQRPGKGLEWV |
| C1979-C12- | | ASINWKGNSLAYGDSVKGRFAISRDNAKNTVFLQMNSLRTEDTAVYYC |
| aa | | ASHQGVAYYNYAMDVWGRGTLVTVSSGGGGSGGGGSGGGGSEIVLTQS |
| ScFv domain | | PGTLSLSPGERATLSCRATQSIGSSFLAWYQQRPGQAPRLLIYGASQR |
| | | ATGIPDRFSGRGSGTDFTLTISRVEPEDSAVYYCQHYESSPSWTFGQG |
| | | TKVEIK |
| BCMA_EBB- | 1136 | GAAGTGCAGCTCGTGGAGAGCGGGGGAGGATTGGTGCAGCCCGGAAGG |
| C1979-C12- | | TCCCTGCGGCTCTCCTGCACTGCGTCTGGCTTCACCTTCGACGACTAC |
| nt | | GCGATGCACTGGGTCAGACAGCGCCCGGGAAAGGGCCTGGAATGGGTC |
| ScFv domain | | GCCTCAATCAACTGGAAGGGAAACTCCCTGGCCTATGGCGACAGCGTG |
| | | AAGGGCCGCTTCGCCATTTCGCGCGACAACGCCAAGAACACCGTGTTT |
| | | CTGCAAATGAATTCCCTGCGGACCGAGGATACCGCTGTGTACTACTGC |
| | | GCCAGCCACCAGGGCGTGGCATACTATAACTACGCCATGGACGTGTGG |
| | | GGAAGAGGGACGCTCGTCACCGTGTCCTCCGGGGGCGGTGGATCGGGT |
| | | GGAGGAGGAAGCGGTGGCGGGGGCAGCGAAATCGTGCTGACTCAGAGC |
| | | CCGGGAACTCTTTCACTGTCCCCGGGAGAACGGGCCACTCTCTCGTGC |
| | | CGGGCCACCCAGTCCATCGGCTCCTCCTTCCTTGCCTGGTACCAGCAG |
| | | AGGCCAGGACAGGCGCCCCGCCTGCTGATCTACGGTGCTTCCCAACGC |
| | | GCCACTGGCATTCCTGACCGGTTCAGCGGCAGAGGGTCGGGAACCGAT |
| | | TTCACACTGACCATTTCCCGGGTGGAGCCCGAAGATTCGGCAGTCTAC |
| | | TACTGTCAGCATTACGAGTCCTCCCCTTCATGGACCTTCGGTCAAGGG |
| | | ACCAAAGTGGAGATCAAG |
| BCMA_EBB- | 1137 | EVQLVESGGGLVQPGRSLRLSCTASGFTFDDYAMHWVRQRPGKGLEWV |
| C1979-C12- | | ASINWKGNSLAYGDSVKGRFAISRDNAKNTVFLQMNSLRTEDTAVYYC |
| aa | | ASHQGVAYYNYAMDVWGRGTLVTVSS |
| VH | | |
| BCMA_EBB- | 1138 | EIVLTQSPGTLSLSPGERATLSCRATQSIGSSFLAWYQQRPGQAPRLL |
| C1979-C12- | | IYGASQRATGIPDRFSGRGSGTDFTLTISRVEPEDSAVYYCQHYESSP |
| aa | | SWTFGQGTKVEIK |
| VL | | |
| BCMA_EBB- | 1139 | MALPVTALLLPLALLLHAARPEVQLVESGGGLVQPGRSLRLSCTASGF |
| C1979-C12- | | TFDDYAMHWVRQRPGKGLEWVASINWKGNSLAYGDSVKGRFAISRDNA |
| aa | | KNTVFLQMNSLRTEDTAVYYCASHQGVAYYNYAMDVWGRGTLVTVSSG |
| Full CART | | GGGSGGGGSGGGGSEIVLTQSPGTLSLSPGERATLSCRATQSIGSSFL |
| | | AWYQQRPGQAPRLLIYGASQRATGIPDRFSGRGSGTDFTLTISRVEPE |
| | | DSAVYYCQHYESSPSWTFGQGTKVEIKTTTPAPRPPTPAPTIASQPLS |
| | | LRPEACRPAAGGAVHTRGLDFACDIYIWAPLAGTCGVLLLSLVITLYC |
| | | KRGRKKLLYIFKQPFMRPVQTTQEEDGCSCRFPEEEEGGCELRVKFSR |
| | | SADAPAYKQGQNQLYNELNLGRREEYDVLDKRRGRDPEMGGKPRRKNP |
| | | QEGLYNELQKDKMAEAYSEIGMKGERRRGKGHDGLYQGLSTATKDTYD |
| | | ALHMQALPPR |
| BCMA_EBB- | 1140 | ATGGCCCTCCCTGTCACCGCCCTGCTGCTTCCGCTGGCTCTTCTGCTC |
| C1979-C12- | | CACGCCGCTCGGCCCGAAGTGCAGCTCGTGGAGAGCGGGGGAGGATTG |
| nt | | GTGCAGCCCGGAAGGTCCCTGCGGCTCTCCTGCACTGCGTCTGGCTTC |
| Full CART | | ACCTTCGACGACTACGCGATGCACTGGGTCAGACAGCGCCCGGGAAAG |
| | | GGCCTGGAATGGGTCGCCTCAATCAACTGGAAGGGAAACTCCCTGGCC |
| | | TATGGCGACAGCGTGAAGGGCCGCTTCGCCATTTCGCGCGACAACGCC |
| | | AAGAACACCGTGTTTCTGCAAATGAATTCCCTGCGGACCGAGGATACC |
| | | GCTGTGTACTACTGCGCCAGCCACCAGGGCGTGGCATACTATAACTAC |
| | | GCCATGGACGTGTGGGGAAGAGGGACGCTCGTCACCGTGTCCTCCGGG |
| | | GGCGGTGGATCGGGTGGAGGAGGAAGCGGTGGCGGGGGCAGCGAAATC |
| | | GTGCTGACTCAGAGCCCGGGAACTCTTTCACTGTCCCCGGGAGAACGG |
| | | GCCACTCTCTCGTGCCGGGCCACCCAGTCCATCGGCTCCTCCTTCCTT |
| | | GCCTGGTACCAGCAGAGGCCAGGACAGGCGCCCCGCCTGCTGATCTAC |
| | | GGTGCTTCCCAACGCGCCACTGGCATTCCTGACCGGTTCAGCGGCAGA |
| | | GGGTCGGGAACCGATTTCACACTGACCATTTCCCGGGTGGAGCCCGAA |
| | | GATTCGGCAGTCTACTACTGTCAGCATTACGAGTCCTCCCCTTCATGG |
| | | ACCTTCGGTCAAGGGACCAAAGTGGAGATCAAGACCACTACCCCAGCA |
| | | CCGAGGCCACCCACCCCGGCTCCTACCATCGCCTCCCAGCCTCTGTCC |
| | | CTGCGTCCGGAGGCATGTAGACCCGCAGCTGGTGGGGCCGTGCATACC |
| | | CGGGGTCTTGACTTCGCCTGCGATATCTACATTTGGGCCCCTCTGGCT |
| | | GGTACTTGCGGGGTCCTGCTGCTTTCACTCGTGATCACTCTTTACTGT |
| | | AAGCGCGGTCGGAAGAAGCTGCTGTACATCTTTAAGCAACCCTTCATG |
| | | AGGCCTGTGCAGACTACTCAAGAGGAGGACGGCTGTTCATGCCGGTTC |
| | | CCAGAGGAGGAGGAAGGCGGCTGCGAACTGCGCGTGAAATTCAGCCGC |
| | | AGCGCAGATGCTCCAGCCTACAAGCAGGGGCAGAACCAGCTCTACAAC |
| | | GAACTCAATCTTGGTCGGAGAGAGGAGTACGACGTGCTGGACAAGCGG |
| | | AGAGGACGGGACCCAGAAATGGGCGGGAAGCCGCGCAGAAAGAATCCC |
| | | CAAGAGGGCCTGTACAACGAGCTCCAAAAGGATAAGATGGCAGAAGCC |
| | | TATAGCGAGATTGGTATGAAAGGGGAACGCAGAAGAGGCAAAGGCCAC |
| | | GACGGACTGTACCAGGGACTCAGCACCGCCACCAAGGACACCTATGAC |
| | | GCTCTTCACATGCAGGCCCTGCCGCCTCGG |

BCMA_EBB-C1980-G4

| | | |
|---|---|---|
| BCMA_EBB- | 1141 | EVQLVESGGGLVQPGGSLRLSCAASGFTFSSYAMSWVRQAPGKGLEWV |
| C1980-G4-aa | | SAISGSGGSTYYADSVKGRFTISRDNSKNTLYLQMNSLRAEDTAVYYC |
| ScFv domain | | AKVVRDGMDVWGQGTTVTVSSGGGGSGGGGSGGGGSEIVLTQSPATLS |
| | | LSPGERATLSCRASQSVSSSYLAWYQQKPGQAPRLLIYGASSRATGIP |
| | | DRFSGNGSGTDFTLTISRLEPEDFAVYYCQQYGSPPRFTFGPGTKVDI |
| | | K |
| BCMA_EBB- | 1142 | GAGGTGCAGTTGGTCGAAAGCGGGGGCGGGCTTGTGCAGCCTGGCGGA |
| C1980-G4-nt | | TCACTGCGGCTGTCCTGCGCGGCATCAGGCTTCACGTTTTCTTCCTAC |
| ScFv domain | | GCCATGTCCTGGGTGCGCCAGGCCCCTGGAAAGGGACTGGAATGGGTG |
| | | TCCGCGATTTCGGGGTCCGGCGGGAGCACCTACTACGCCGATTCCGTG |
| | | AAGGGCCGCTTCACTATCTCGCGGGACAACTCCAAGAACACCCTCTAC |
| | | CTCCAAATGAATAGCCTGCGGGCCGAGGATACCGCCGTCTACTATTGC |
| | | GCTAAGGTCGTGCGCGACGGAATGGACGTGTGGGGACAGGGTACCACC |
| | | GTGACAGTGTCCTCGGGGGGAGGCGGTAGCGGCGGAGGAGGAAGCGGT |
| | | GGTGGAGGTTCCGAGATTGTGCTGACTCAATCACCCGCGACCCTGAGC |
| | | CTGTCCCCCGGCGAAAGGGCCACTCTGTCCTGTCGGGCCAGCCAATCA |
| | | GTCTCCTCCTCGTACCTGGCCTGGTACCAGCAGAAGCCAGGACAGGCT |
| | | CCGAGACTCCTTATCTATGGCGCATCCTCCCGCGCCACCGGAATCCCG |
| | | GATAGGTTCTCGGGAAACGGATCGGGGACCGACTTCACTCTCACCATC |
| | | TCCCGGCTGGAACCGGAGGACTTCGCCGTGTACTACTGCCAGCAGTAC |
| | | GGCAGCCCGCCTAGATTCACTTTCGGCCCCGGCACCAAAGTGGACATC |
| | | AAG |
| BCMA_EBB- | 1143 | EVQLVESGGGLVQPGGSLRLSCAASGFTFSSYAMSWVRQAPGKGLEWV |
| C1980-G4-aa | | SAISGSGGSTYYADSVKGRFTISRDNSKNTLYLQMNSLRAEDTAVYYC |
| VH | | AKVVRDGMDVWGQGTTVTVSS |
| BCMA_EBB- | 1144 | EIVLTQSPATLSLSPGERATLSCRASQSVSSSYLAWYQQKPGQAPRLL |
| C1980-G4-aa | | IYGASSRATGIPDRFSGNGSGTDFTLTISRLEPEDFAVYYCQQYGSPP |
| VL | | RFTFGPGTKVDIK |
| BCMA_EBB- | 1145 | MALPVTALLLPLALLLHAARPEVQLVESGGGLVQPGGSLRLSCAASGF |
| C1980-G4-aa | | TFSSYAMSWVRQAPGKGLEWVSAISGSGGSTYYADSVKGRFTISRDNS |
| Full CART | | KNTLYLQMNSLRAEDTAVYYCAKVVRDGMDVWGQGTTVTVSSGGGGSG |
| | | GGGSGGGGSEIVLTQSPATLSLSPGERATLSCRASQSVSSSYLAWYQQ |
| | | KPGQAPRLLIYGASSRATGIPDRFSGNGSGTDFTLTISRLEPEDFAVY |
| | | YCQQYGSPPRFTFGPGTKVDIKTTTPAPRPPTPAPTIASQPLSLRPEA |
| | | CRPAAGGAVHTRGLDFACDIYIWAPLAGTCGVLLLSLVITLYCKRGRK |
| | | KLLYIFKQPFMRPVQTTQEEDGCSCRFPEEEEGGCELRVKFSRSADAP |
| | | AYKQGQNQLYNELNLGRREEYDVLDKRRGRDPEMGGKPRRKNPQEGLY |
| | | NELQKDKMAEAYSEIGMKGERRRGKGHDGLYQGLSTATKDTYDALHMQ |
| | | ALPPR |
| BCMA_EBB- | 1146 | ATGGCCCTCCCTGTCACCGCCCTGCTGCTTCCGCTGGCTCTTCTGCTC |
| C1980-G4-nt | | CACGCCGCTCGGCCCGAGGTGCAGTTGGTCGAAAGCGGGGGCGGGCTT |
| Full CART | | GTGCAGCCTGGCGGATCACTGCGGCTGTCCTGCGCGGCATCAGGCTTC |
| | | ACGTTTTCTTCCTACGCCATGTCCTGGGTGCGCCAGGCCCCTGGAAAG |
| | | GGACTGGAATGGGTGTCCGCGATTTCGGGGTCCGGCGGGAGCACCTAC |
| | | TACGCCGATTCCGTGAAGGGCCGCTTCACTATCTCGCGGGACAACTCC |
| | | AAGAACACCCTCTACCTCCAAATGAATAGCCTGCGGGCCGAGGATACC |
| | | GCCGTCTACTATTGCGCTAAGGTCGTGCGCGACGGAATGGACGTGTGG |
| | | GGACAGGGTACCACCGTGACAGTGTCCTCGGGGGGAGGCGGTAGCGGC |
| | | GGAGGAGGAAGCGGTGGTGGAGGTTCCGAGATTGTGCTGACTCAATCA |
| | | CCCGCGACCCTGAGCCTGTCCCCCGGCGAAAGGGCCACTCTGTCCTGT |
| | | CGGGCCAGCCAATCAGTCTCCTCCTCGTACCTGGCCTGGTACCAGCAG |
| | | AAGCCAGGACAGGCTCCGAGACTCCTTATCTATGGCGCATCCTCCCGC |
| | | GCCACCGGAATCCCGGATAGGTTCTCGGGAAACGGATCGGGGACCGAC |
| | | TTCACTCTCACCATCTCCCGGCTGGAACCGGAGGACTTCGCCGTGTAC |
| | | TACTGCCAGCAGTACGGCAGCCCGCCTAGATTCACTTTCGGCCCCGGC |
| | | ACCAAAGTGGACATCAAGACCACTACCCCAGCACCGAGGCCACCCACC |
| | | CCGGCTCCTACCATCGCCTCCCAGCCTCTGTCCCTGCGTCCGGAGGCA |
| | | TGTAGACCCGCAGCTGGTGGGGCCGTGCATACCCGGGGTCTTGACTTC |
| | | GCCTGCGATATCTACATTTGGGCCCCTCTGGCTGGTACTTGCGGGGTC |
| | | CTGCTGCTTTCACTCGTGATCACTCTTTACTGTAAGCGCGGTCGGAAG |
| | | AAGCTGCTGTACATCTTTAAGCAACCCTTCATGAGGCCTGTGCAGACT |
| | | ACTCAAGAGGAGGACGGCTGTTCATGCCGGTTCCCAGAGGAGGAGGAA |
| | | GGCGGCTGCGAACTGCGCGTGAAATTCAGCCGCAGCGCAGATGCTCCA |
| | | GCCTACAAGCAGGGGCAGAACCAGCTCTACAACGAACTCAATCTTGGT |
| | | CGGAGAGAGGAGTACGACGTGCTGGACAAGCGGAGAGGACGGGACCCA |
| | | GAAATGGGCGGGAAGCCGCGCAGAAAGAATCCCCAAGAGGGCCTGTAC |
| | | AACGAGCTCCAAAAGGATAAGATGGCAGAAGCCTATAGCGAGATTGGT |
| | | ATGAAAGGGGAACGCAGAAGAGGCAAAGGCCACGACGGACTGTACCAG |
| | | GGACTCAGCACCGCCACCAAGGACACCTATGACGCTCTTCACATGCAG |
| | | GCCCTGCCGCCTCGG |

BCMA_EBB-C1980-D2

| | | |
|---|---|---|
| BCMA_EBB- | 1147 | EVQLLESGGGLVQPGGSLRLSCAASGFTFSSYAMSWVRQAPGKGLEWV |
| C1980-D2-aa | | SAISGSGGSTYYADSVKGRFTISRDNSKNTLYLQMNSLRAEDTAVYYC |
| ScFv domain | | AKIPQTGTFDYWGQGTLVTVSSGGGGSGGGGSGGGGSEIVLTQSPGTL |
| | | SLSPGERATLSCRASQSVSSSYLAWYQQRPGQAPRLLIYGASSRATGI |
| | | PDRFSGSGSGTDFTLTISRLEPEDFAVYYCQHYGSSPSWTFGQGTRLE |
| | | IK |
| BCMA_EBB- | 1148 | GAAGTGCAGCTGCTGGAGTCCGGCGGTGGATTGGTGCAACCGGGGGGA |
| C1980-D2-nt | | TCGCTCAGACTGTCCTGTGCGGCGTCAGGCTTCACCTTCTCGAGCTAC |
| ScFv domain | | GCCATGTCATGGGTCAGACAGGCCCCTGGAAAGGGTCTGGAATGGGTG |
| | | TCCGCCATTTCCGGGAGCGGGGGATCTACATACTACGCCGATAGCGTG |
| | | AAGGGCCGCTTCACCATTTCCCGGGACAACTCCAAGAACACTCTCTAT |
| | | CTGCAAATGAACTCCCTCCGCGCTGAGGACACTGCCGTGTACTACTGC |
| | | GCCAAAATCCCTCAGACCGGCACCTTCGACTACTGGGGACAGGGGACT |
| | | CTGGTCACCGTCAGCAGCGGTGGCGGAGGTTCGGGGGGAGGAGGAAGC |
| | | GGCGGCGGAGGGTCCGAGATTGTGCTGACCCAGTCACCCGGCACTTTG |
| | | TCCCTGTCGCCTGGAGAAAGGGCCACCCTTTCCTGCCGGGCATCCCAA |
| | | TCCGTGTCCTCCTCGTACCTGGCCTGGTACCAGCAGAGGCCCGGACAG |
| | | GCCCCACGGCTTCTGATCTACGGAGCAAGCAGCCGCGCGACCGGTATC |
| | | CCGGACCGGTTTTCGGGCTCGGGCTCAGGAACTGACTTCACCCTCACC |
| | | ATCTCCCGCCTGGAACCCGAAGATTTCGCTGTGTATTACTGCCAGCAC |
| | | TACGGCAGCTCCCCGTCCTGGACGTTCGGCCAGGGAACTCGGCTGGAG |
| | | ATCAAG |
| BCMA_EBB- | 1149 | EVQLLESGGGLVQPGGSLRLSCAASGFTFSSYAMSWVRQAPGKGLEWV |
| C1980-D2-aa | | SAISGSGGSTYYADSVKGRFTISRDNSKNTLYLQMNSLRAEDTAVYYC |
| VH | | AKIPQTGTFDYWGQGTLVTVSS |
| BCMA_EBB- | 1150 | EIVLTQSPGTLSLSPGERATLSCRASQSVSSSYLAWYQQRPGQAPRLL |
| C1980-D2-aa | | IYGASSRATGIPDRFSGSGSGTDFTLTISRLEPEDFAVYYCQHYGSSP |
| VL | | SWTFGQGTRLEIK |
| BCMA_EBB- | 1151 | MALPVTALLLPLALLLHAARPEVQLLESGGGLVQPGGSLRLSCAASGF |
| C1980-D2-aa | | TFSSYAMSWVRQAPGKGLEWVSAISGSGGSTYYADSVKGRFTISRDNS |
| Full CART | | KNTLYLQMNSLRAEDTAVYYCAKIPQTGTFDYWGQGTLVTVSSGGGGS |
| | | GGGGSGGGGSEIVLTQSPGTLSLSPGERATLSCRASQSVSSSYLAWYQ |
| | | QRPGQAPRLLIYGASSRATGIPDRFSGSGSGTDFTLTISRLEPEDFAV |
| | | YYCQHYGSSPSWTFGQGTRLEIKTTTPAPRPPTPAPTIASQPLSLRPE |
| | | ACRPAAGGAVHTRGLDFACDIYIWAPLAGTCGVLLLSLVITLYCKRGR |
| | | KKLLYIFKQPFMRPVQTTQEEDGCSCRFPEEEEGGCELRVKFSRSADA |
| | | PAYKQGQNQLYNELNLGRREEYDVLDKRRGRDPEMGGKPRRKNPQEGL |
| | | YNELQKDKMAEAYSEIGMKGERRRGKGHDGLYQGLSTATKDTYDALHM |
| | | QALPPR |
| BCMA_EBB- | 1152 | ATGGCCCTCCCTGTCACCGCCCTGCTGCTTCCGCTGGCTCTTCTGCTC |
| C1980-D2-nt | | CACGCCGCTCGGCCCGAAGTGCAGCTGCTGGAGTCCGGCGGTGGATTG |
| Full CART | | GTGCAACCGGGGGGATCGCTCAGACTGTCCTGTGCGGCGTCAGGCTTC |
| | | ACCTTCTCGAGCTACGCCATGTCATGGGTCAGACAGGCCCCTGGAAAG |
| | | GGTCTGGAATGGGTGTCCGCCATTTCCGGGAGCGGGGGATCTACATAC |
| | | TACGCCGATAGCGTGAAGGGCCGCTTCACCATTTCCCGGGACAACTCC |
| | | AAGAACACTCTCTATCTGCAAATGAACTCCCTCCGCGCTGAGGACACT |
| | | GCCGTGTACTACTGCGCCAAAATCCCTCAGACCGGCACCTTCGACTAC |
| | | TGGGGACAGGGGACTCTGGTCACCGTCAGCAGCGGTGGCGGAGGTTCG |
| | | GGGGGAGGAGGAAGCGGCGGCGGAGGGTCCGAGATTGTGCTGACCCAG |
| | | TCACCCGGCACTTTGTCCCTGTCGCCTGGAGAAAGGGCCACCCTTTCC |
| | | TGCCGGGCATCCCAATCCGTGTCCTCCTCGTACCTGGCCTGGTACCAG |
| | | CAGAGGCCCGGACAGGCCCCACGGCTTCTGATCTACGGAGCAAGCAGC |
| | | CGCGCGACCGGTATCCCGGACCGGTTTTCGGGCTCGGGCTCAGGAACT |
| | | GACTTCACCCTCACCATCTCCCGCCTGGAACCCGAAGATTTCGCTGTG |
| | | TATTACTGCCAGCACTACGGCAGCTCCCCGTCCTGGACGTTCGGCCAG |
| | | GGAACTCGGCTGGAGATCAAGACCACTACCCCAGCACCGAGGCCACCC |
| | | ACCCCGGCTCCTACCATCGCCTCCCAGCCTCTGTCCCTGCGTCCGGAG |
| | | GCATGTAGACCCGCAGCTGGTGGGGCCGTGCATACCCGGGGTCTTGAC |
| | | TTCGCCTGCGATATCTACATTTGGGCCCCTCTGGCTGGTACTTGCGGG |
| | | GTCCTGCTGCTTTCACTCGTGATCACTCTTTACTGTAAGCGCGGTCGG |
| | | AAGAAGCTGCTGTACATCTTTAAGCAACCCTTCATGAGGCCTGTGCAG |
| | | ACTACTCAAGAGGAGGACGGCTGTTCATGCCGGTTCCCAGAGGAGGAG |
| | | GAAGGCGGCTGCGAACTGCGCGTGAAATTCAGCCGCAGCGCAGATGCT |
| | | CCAGCCTACAAGCAGGGGCAGAACCAGCTCTACAACGAACTCAATCTT |
| | | GGTCGGAGAGAGGAGTACGACGTGCTGGACAAGCGGAGAGGACGGGAC |
| | | CCAGAAATGGGCGGGAAGCCGCGCAGAAAGAATCCCCAAGAGGGCCTG |
| | | TACAACGAGCTCCAAAAGGATAAGATGGCAGAAGCCTATAGCGAGATT |
| | | GGTATGAAAGGGGAACGCAGAAGAGGCAAAGGCCACGACGGACTGTAC |
| | | CAGGGACTCAGCACCGCCACCAAGGACACCTATGACGCTCTTCACATG |
| | | CAGGCCCTGCCGCCTCGG |

BCMA_EBB-C1978-A10

| | | |
|---|---|---|
| BCMA_EBB- | 1153 | EVQLVETGGGLVQPGGSLRLSCAASGFTFSSYAMSWVRQAPGKGLEWV |
| C1978-A10- | | SAISGSGGSTYYADSVKGRFTMSRENDKNSVFLQMNSLRVEDTGVYYC |
| aa | | ARANYKRELRYYYGMDVWGQGTMVTVSSGGGGSGGGGSGGGGSEIVMT |
| ScFv domain | | QSPGTLSLSPGESATLSCRASQRVASNYLAWYQHKPGQAPSLLISGAS |
| | | SRATGVPDRFSGSGSGTDFTLAISRLEPEDSAVYYCQHYDSSPSWTFG |
| | | QGTKVEIK |
| BCMA_EBB- | 1154 | GAAGTGCAACTGGTGGAAACCGGTGGAGGACTCGTGCAGCCTGGCGGC |
| C1978-A10- | | AGCCTCCGGCTGAGCTGCGCCGCTTCGGGATTCACCTTTTCCTCCTAC |
| nt | | GCGATGTCTTGGGTCAGACAGGCCCCCGGAAAGGGGCTGGAATGGGTG |
| ScFv domain | | TCAGCCATCTCCGGCTCCGGCGGATCAACGTACTACGCCGACTCCGTG |
| | | AAAGGCCGGTTCACCATGTCGCGCGAGAATGACAAGAACTCCGTGTTC |
| | | CTGCAAATGAACTCCCTGAGGGTGGAGGACACCGGAGTGTACTATTGT |
| | | GCGCGCGCCAACTACAAGAGAGAGCTGCGGTACTACTACGGAATGGAC |
| | | GTCTGGGGACAGGGAACTATGGTGACCGTGTCATCCGGTGGAGGGGGA |
| | | AGCGGCGGTGGAGGCAGCGGGGGCGGGGGTTCAGAAATTGTCATGACC |
| | | CAGTCCCCGGGAACTCTTTCCCTCTCCCCCGGGGAATCCGCGACTTTG |
| | | TCCTGCCGGGCCAGCCAGCGCGTGGCCTCGAACTACCTCGCATGGTAC |
| | | CAGCATAAGCCAGGCCAAGCCCCTTCCCTGCTGATTTCCGGGGCTAGC |
| | | AGCCGCGCCACTGGCGTGCCGGATAGGTTCTCGGGAAGCGGCTCGGGT |
| | | ACCGATTTCACCCTGGCAATCTCGCGGCTGGAACCGGAGGATTCGGCC |
| | | GTGTACTACTGCCAGCACTATGACTCATCCCCCTCCTGGACATTCGGA |
| | | CAGGGCACCAAGGTCGAGATCAAG |
| BCMA_EBB- | 1155 | EVQLVETGGGLVQPGGSLRLSCAASGFTFSSYAMSWVRQAPGKGLEWV |
| C1978-A10- | | SAISGSGGSTYYADSVKGRFTMSRENDKNSVFLQMNSLRVEDTGVYYC |
| aa | | ARANYKRELRYYYGMDVWGQGTMVTVSS |
| VH | | |
| BCMA_EBB- | 1156 | EIVMTQSPGTLSLSPGESATLSCRASQRVASNYLAWYQHKPGQAPSLL |
| C1978-A10- | | ISGASSRATGVPDRFSGSGSGTDFTLAISRLEPEDSAVYYCQHYDSSP |
| aa | | SWTFGQGTKVEIK |
| VL | | |
| BCMA_EBB- | 1157 | MALPVTALLLPLALLLHAARPEVQLVETGGGLVQPGGSLRLSCAASGF |
| C1978-A10- | | TFSSYAMSWVRQAPGKGLEWVSAISGSGGSTYYADSVKGRFTMSREND |
| aa | | KNSVFLQMNSLRVEDTGVYYCARANYKRELRYYYGMDVWGQGTMVTVS |
| Full CART | | SGGGGSGGGGSGGGGSEIVMTQSPGTLSLSPGESATLSCRASQRVASN |
| | | YLAWYQHKPGQAPSLLISGASSRATGVPDRFSGSGSGTDFTLAISRLE |
| | | PEDSAVYYCQHYDSSPSWTFGQGTKVEIKTTTPAPRPPTPAPTIASQP |
| | | LSLRPEACRPAAGGAVHTRGLDFACDIYIWAPLAGTCGVLLLSLVITL |
| | | YCKRGRKKLLYIFKQPFMRPVQTTQEEDGCSCRFPEEEEGGCELRVKF |
| | | SRSADAPAYKQGQNQLYNELNLGRREEYDVLDKRRGRDPEMGGKPRRK |
| | | NPQEGLYNELQKDKMAEAYSEIGMKGERRRGKGHDGLYQGLSTATKDT |
| | | YDALHMQALPPR |
| BCMA_EBB- | 1158 | ATGGCCCTCCCTGTCACCGCCCTGCTGCTTCCGCTGGCTCTTCTGCTC |
| C1978-A10- | | CACGCCGCTCGGCCCGAAGTGCAACTGGTGGAAACCGGTGGAGGACTC |
| nt | | GTGCAGCCTGGCGGCAGCCTCCGGCTGAGCTGCGCCGCTTCGGGATTC |
| Full CART | | ACCTTTTCCTCCTACGCGATGTCTTGGGTCAGACAGGCCCCCGGAAAG |
| | | GGGCTGGAATGGGTGTCAGCCATCTCCGGCTCCGGCGGATCAACGTAC |
| | | TACGCCGACTCCGTGAAAGGCCGGTTCACCATGTCGCGCGAGAATGAC |
| | | AAGAACTCCGTGTTCCTGCAAATGAACTCCCTGAGGGTGGAGGACACC |
| | | GGAGTGTACTATTGTGCGCGCGCCAACTACAAGAGAGAGCTGCGGTAC |
| | | TACTACGGAATGGACGTCTGGGGACAGGGAACTATGGTGACCGTGTCA |
| | | TCCGGTGGAGGGGGAAGCGGCGGTGGAGGCAGCGGGGGCGGGGGTTCA |
| | | GAAATTGTCATGACCCAGTCCCCGGGAACTCTTTCCCTCTCCCCCGGG |
| | | GAATCCGCGACTTTGTCCTGCCGGGCCAGCCAGCGCGTGGCCTCGAAC |
| | | TACCTCGCATGGTACCAGCATAAGCCAGGCCAAGCCCCTTCCCTGCTG |
| | | ATTTCCGGGGCTAGCAGCCGCGCCACTGGCGTGCCGGATAGGTTCTCG |
| | | GGAAGCGGCTCGGGTACCGATTTCACCCTGGCAATCTCGCGGCTGGAA |
| | | CCGGAGGATTCGGCCGTGTACTACTGCCAGCACTATGACTCATCCCCC |
| | | TCCTGGACATTCGGACAGGGCACCAAGGTCGAGATCAAGACCACTACC |
| | | CCAGCACCGAGGCCACCCACCCCGGCTCCTACCATCGCCTCCCAGCCT |
| | | CTGTCCCTGCGTCCGGAGGCATGTAGACCCGCAGCTGGTGGGGCCGTG |
| | | CATACCCGGGGTCTTGACTTCGCCTGCGATATCTACATTTGGGCCCCT |
| | | CTGGCTGGTACTTGCGGGGTCCTGCTGCTTTCACTCGTGATCACTCTT |
| | | TACTGTAAGCGCGGTCGGAAGAAGCTGCTGTACATCTTTAAGCAACCC |
| | | TTCATGAGGCCTGTGCAGACTACTCAAGAGGAGGACGGCTGTTCATGC |
| | | CGGTTCCCAGAGGAGGAGGAAGGCGGCTGCGAACTGCGCGTGAAATTC |
| | | AGCCGCAGCGCAGATGCTCCAGCCTACAAGCAGGGGCAGAACCAGCTC |
| | | TACAACGAACTCAATCTTGGTCGGAGAGAGGAGTACGACGTGCTGGAC |
| | | AAGCGGAGAGGACGGGACCCAGAAATGGGCGGGAAGCCGCGCAGAAAG |
| | | AATCCCCAAGAGGGCCTGTACAACGAGCTCCAAAAGGATAAGATGGCA |
| | | GAAGCCTATAGCGAGATTGGTATGAAAGGGGAACGCAGAAGAGGCAAA |
| | | GGCCACGACGGACTGTACCAGGGACTCAGCACCGCCACCAAGGACACC |
| | | TATGACGCTCTTCACATGCAGGCCCTGCCGCCTCGG |

BCMA_EBB-C1978-D4

| | | |
|---|---|---|
| BCMA_EBB- | 1159 | EVQLLETGGGLVQPGGSLRLSCAASGFSFSSYAMSWVRQAPGKGLEWV |
| C1978-D4-aa | | SAISGSGGSTYYADSVKGRFTISRDNSKNTLYLQMNSLRAEDTAVYYC |
| ScFv domain | | AKALVGATGAFDIWGQGTLVTVSSGGGGSGGGGSGGGGSEIVLTQSPG |
| | | TLSLSPGERATLSCRASQSLSSNFLAWYQQKPGQAPGLLIYGASNWAT |
| | | GTPDRFSGSGSGTDFTLTITRLEPEDFAVYYCQYYGTSPMYTFGQGTK |
| | | VEIK |
| BCMA_EBB- | 1160 | GAAGTGCAGCTGCTCGAAACCGGTGGAGGGCTGGTGCAGCCAGGGGGC |
| C1978-D4-nt | | TCCCTGAGGCTTTCATGCGCCGCTAGCGGATTCTCCTTCTCCTCTTAC |
| ScFv domain | | GCCATGTCGTGGGTCCGCCAAGCCCCTGGAAAAGGCCTGGAATGGGTG |
| | | TCCGCGATTTCCGGGAGCGGAGGTTCGACCTATTACGCCGACTCCGTG |
| | | AAGGGCCGCTTTACCATCTCCCGGGATAACTCCAAGAACACTCTGTAC |
| | | CTCCAAATGAACTCGCTGAGAGCCGAGGACACCGCCGTGTATTACTGC |
| | | GCGAAGGCGCTGGTCGGCGCGACTGGGGCATTCGACATCTGGGGACAG |
| | | GGAACTCTTGTGACCGTGTCGAGCGGAGGCGGCGGCTCCGGCGGAGGA |
| | | GGGAGCGGGGGCGGTGGTTCCGAAATCGTGTTGACTCAGTCCCCGGGA |
| | | ACCCTGAGCTTGTCACCCGGGGAGCGGGCCACTCTCTCCTGTCGCGCC |
| | | TCCCAATCGCTCTCATCCAATTTCCTGGCCTGGTACCAGCAGAAGCCC |
| | | GGACAGGCCCCGGGCCTGCTCATCTACGGCGCTTCAAACTGGGCAACG |
| | | GGAACCCCTGATCGGTTCAGCGGAAGCGGATCGGGTACTGACTTTACC |
| | | CTGACCATCACCAGACTGGAACCGGAGGACTTCGCCGTGTACTACTGC |
| | | CAGTACTACGGCACCTCCCCCATGTACACATTCGGACAGGGTACCAAG |
| | | GTCGAGATTAAG |
| BCMA_EBB- | 1161 | EVQLLETGGGLVQPGGSLRLSCAASGFSFSSYAMSWVRQAPGKGLEWV |
| C1978-D4-aa | | SAISGSGGSTYYADSVKGRFTISRDNSKNTLYLQMNSLRAEDTAVYYC |
| VH | | AKALVGATGAFDIWGQGTLVTVSS |
| BCMA_EBB- | 1162 | EIVLTQSPGTLSLSPGERATLSCRASQSLSSNFLAWYQQKPGQAPGLL |
| C1978-D4-aa | | IYGASNWATGTPDRFSGSGSGTDFTLTITRLEPEDFAVYYCQYYGTSP |
| VL | | MYTFGQGTKVEIK |
| BCMA_EBB- | 1163 | MALPVTALLLPLALLLHAARPEVQLLETGGGLVQPGGSLRLSCAASGF |
| C1978-D4-aa | | SFSSYAMSWVRQAPGKGLEWVSAISGSGGSTYYADSVKGRFTISRDNS |
| Full CART | | KNTLYLQMNSLRAEDTAVYYCAKALVGATGAFDIWGQGTLVTVSSGGG |
| | | GSGGGGSGGGGSEIVLTQSPGTLSLSPGERATLSCRASQSLSSNFLAW |
| | | YQQKPGQAPGLLIYGASNWATGTPDRFSGSGSGTDFTLTITRLEPEDF |
| | | AVYYCQYYGTSPMYTFGQGTKVEIKTTTPAPRPPTPAPTIASQPLSLR |
| | | PEACRPAAGGAVHTRGLDFACDIYIWAPLAGTCGVLLLSLVITLYCKR |
| | | GRKKLLYIFKQPFMRPVQTTQEEDGCSCRFPEEEEGGCELRVKFSRSA |
| | | DAPAYKQGQNQLYNELNLGRREEYDVLDKRRGRDPEMGGKPRRKNPQE |
| | | GLYNELQKDKMAEAYSEIGMKGERRRGKGHDGLYQGLSTATKDTYDAL |
| | | HMQALPPR |
| BCMA_EBB- | 1164 | ATGGCCCTCCCTGTCACCGCCCTGCTGCTTCCGCTGGCTCTTCTGCTC |
| C1978-D4-nt | | CACGCCGCTCGGCCCGAAGTGCAGCTGCTCGAAACCGGTGGAGGGCTG |
| Full CART | | GTGCAGCCAGGGGGCTCCCTGAGGCTTTCATGCGCCGCTAGCGGATTC |
| | | TCCTTCTCCTCTTACGCCATGTCGTGGGTCCGCCAAGCCCCTGGAAAA |
| | | GGCCTGGAATGGGTGTCCGCGATTTCCGGGAGCGGAGGTTCGACCTAT |
| | | TACGCCGACTCCGTGAAGGGCCGCTTTACCATCTCCCGGGATAACTCC |
| | | AAGAACACTCTGTACCTCCAAATGAACTCGCTGAGAGCCGAGGACACC |
| | | GCCGTGTATTACTGCGCGAAGGCGCTGGTCGGCGCGACTGGGGCATTC |
| | | GACATCTGGGGACAGGGAACTCTTGTGACCGTGTCGAGCGGAGGCGGC |
| | | GGCTCCGGCGGAGGAGGGAGCGGGGGCGGTGGTTCCGAAATCGTGTTG |
| | | ACTCAGTCCCCGGGAACCCTGAGCTTGTCACCCGGGGAGCGGGCCACT |
| | | CTCTCCTGTCGCGCCTCCCAATCGCTCTCATCCAATTTCCTGGCCTGG |
| | | TACCAGCAGAAGCCCGGACAGGCCCCGGGCCTGCTCATCTACGGCGCT |
| | | TCAAACTGGGCAACGGGAACCCCTGATCGGTTCAGCGGAAGCGGATCG |
| | | GGTACTGACTTTACCCTGACCATCACCAGACTGGAACCGGAGGACTTC |
| | | GCCGTGTACTACTGCCAGTACTACGGCACCTCCCCCATGTACACATTC |
| | | GGACAGGGTACCAAGGTCGAGATTAAGACCACTACCCCAGCACCGAGG |
| | | CCACCCACCCCGGCTCCTACCATCGCCTCCCAGCCTCTGTCCCTGCGT |
| | | CCGGAGGCATGTAGACCCGCAGCTGGTGGGGCCGTGCATACCCGGGGT |
| | | CTTGACTTCGCCTGCGATATCTACATTTGGGCCCCTCTGGCTGGTACT |
| | | TGCGGGGTCCTGCTGCTTTCACTCGTGATCACTCTTTACTGTAAGCGC |
| | | GGTCGGAAGAAGCTGCTGTACATCTTTAAGCAACCCTTCATGAGGCCT |
| | | GTGCAGACTACTCAAGAGGAGGACGGCTGTTCATGCCGGTTCCCAGAG |
| | | GAGGAGGAAGGCGGCTGCGAACTGCGCGTGAAATTCAGCCGCAGCGCA |
| | | GATGCTCCAGCCTACAAGCAGGGGCAGAACCAGCTCTACAACGAACTC |
| | | AATCTTGGTCGGAGAGAGGAGTACGACGTGCTGGACAAGCGGAGAGGA |
| | | CGGGACCCAGAAATGGGCGGGAAGCCGCGCAGAAAGAATCCCCAAGAG |
| | | GGCCTGTACAACGAGCTCCAAAAGGATAAGATGGCAGAAGCCTATAGC |
| | | GAGATTGGTATGAAAGGGGAACGCAGAAGAGGCAAAGGCCACGACGGA |
| | | CTGTACCAGGGACTCAGCACCGCCACCAAGGACACCTATGACGCTCTT |
| | | CACATGCAGGCCCTGCCGCCTCGG |

BCMA_EBB-C1980-A2

| | | |
|---|---|---|
| BCMA_EBB- | 1165 | EVQLLESGGGLVQPGGSLRLSCAASGFTFSSYAMSWVRQAPGKGLEWV |
| C1980-A2-aa | | SAISGSGGSTYYADSVKGRFTISRDNSKNTLYLQMNSLRAEDTAVYYC |
| ScFv domain | | VLWFGEGFDPWGQGTLVTVSSGGGGSGGGGSGGGGSDIVLTQSPLSLP |
| | | VTPGEPASISCRSSQSLLHSNGYNYLDWYLQKPGQSPQLLIYLGSNRA |
| | | SGVPDRFSGSGSGTDFTLKISRVEAEDVGVYYCMQALQTPLTFGGGTK |
| | | VDIK |
| BCMA_EBB- | 1166 | GAAGTGCAGCTGCTTGAGAGCGGTGGAGGTCTGGTGCAGCCCGGGGGA |
| C1980-A2-nt | | TCACTGCGCCTGTCCTGTGCCGCGTCCGGTTTCACTTTCTCCTCGTAC |
| ScFv domain | | GCCATGTCGTGGGTCAGACAGGCACCGGGAAAGGGACTGGAATGGGTG |
| | | TCAGCCATTTCGGGTTCGGGGGGCAGCACCTACTACGCTGACTCCGTG |
| | | AAGGGCCGGTTCACCATTTCCCGCGACAACTCCAAGAACACCTTGTAC |
| | | CTCCAAATGAACTCCCTGCGGGCCGAAGATACCGCCGTGTATTACTGC |
| | | GTGCTGTGGTTCGGAGAGGGATTCGACCCGTGGGGACAAGGAACACTC |
| | | GTGACTGTGTCATCCGGCGGAGGCGGCAGCGGTGGCGGCGGTTCCGGC |
| | | GGCGGCGGATCTGACATCGTGTTGACCCAGTCCCCTCTGAGCCTGCCG |
| | | GTCACTCCTGGCGAACCAGCCAGCATCTCCTGCCGGTCGAGCCAGTCC |
| | | CTCCTGCACTCCAATGGGTACAACTACCTCGATTGGTATCTGCAAAAG |
| | | CCGGGCCAGAGCCCCCAGCTGCTGATCTACCTTGGGTCAAACCGCGCT |
| | | TCCGGGGTGCCTGATAGATTCTCCGGGTCCGGGAGCGGAACCGACTTT |
| | | ACCCTGAAAATCTCGAGGGTGGAGGCCGAGGACGTCGGAGTGTACTAC |
| | | TGCATGCAGGCGCTCCAGACTCCCCTGACCTTCGGAGGAGGAACGAAG |
| | | GTCGACATCAAGA |
| BCMA_EBB- | 1167 | EVQLLESGGGLVQPGGSLRLSCAASGFTFSSYAMSWVRQAPGKGLEWV |
| C1980-A2-aa | | SAISGSGGSTYYADSVKGRFTISRDNSKNTLYLQMNSLRAEDTAVYYC |
| VH | | VLWFGEGFDPWGQGTLVTVSS |
| BCMA_EBB- | 1168 | DIVLTQSPLSLPVTPGEPASISCRSSQSLLHSNGYNYLDWYLQKPGQS |
| C1980-A2-aa | | PQLLIYLGSNRASGVPDRFSGSGSGTDFTLKISRVEAEDVGVYYCMQA |
| VL | | LQTPLTFGGGTKVDIK |
| BCMA_EBB- | 1169 | MALPVTALLLPLALLLHAARPEVQLLESGGGLVQPGGSLRLSCAASGF |
| C1980-A2-aa | | TFSSYAMSWVRQAPGKGLEWVSAISGSGGSTYYADSVKGRFTISRDNS |
| Full CART | | KNTLYLQMNSLRAEDTAVYYCVLWFGEGFDPWGQGTLVTVSSGGGGSG |
| | | GGGSGGGGSDIVLTQSPLSLPVTPGEPASISCRSSQSLLHSNGYNYLD |
| | | WYLQKPGQSPQLLIYLGSNRASGVPDRFSGSGSGTDFTLKISRVEAED |
| | | VGVYYCMQALQTPLTFGGGTKVDIKTTTPAPRPPTPAPTIASQPLSLR |
| | | PEACRPAAGGAVHTRGLDFACDIYIWAPLAGTCGVLLLSLVITLYCKR |
| | | GRKKLLYIFKQPFMRPVQTTQEEDGCSCRFPEEEEGGCELRVKFSRSA |
| | | DAPAYKQGQNQLYNELNLGRREEYDVLDKRRGRDPEMGGKPRRKNPQE |
| | | GLYNELQKDKMAEAYSEIGMKGERRRGKGHDGLYQGLSTATKDTYDAL |
| | | HMQALPPR |
| BCMA_EBB- | 1170 | ATGGCCCTCCCTGTCACCGCCCTGCTGCTTCCGCTGGCTCTTCTGCTC |
| C1980-A2-nt | | CACGCCGCTCGGCCCGAAGTGCAGCTGCTTGAGAGCGGTGGAGGTCTG |
| Full CART | | GTGCAGCCCGGGGGATCACTGCGCCTGTCCTGTGCCGCGTCCGGTTTC |
| | | ACTTTCTCCTCGTACGCCATGTCGTGGGTCAGACAGGCACCGGGAAAG |
| | | GGACTGGAATGGGTGTCAGCCATTTCGGGTTCGGGGGGCAGCACCTAC |
| | | TACGCTGACTCCGTGAAGGGCCGGTTCACCATTTCCCGCGACAACTCC |
| | | AAGAACACCTTGTACCTCCAAATGAACTCCCTGCGGGCCGAAGATACC |
| | | GCCGTGTATTACTGCGTGCTGTGGTTCGGAGAGGGATTCGACCCGTGG |
| | | GGACAAGGAACACTCGTGACTGTGTCATCCGGCGGAGGCGGCAGCGGT |
| | | GGCGGCGGTTCCGGCGGCGGCGGATCTGACATCGTGTTGACCCAGTCC |
| | | CCTCTGAGCCTGCCGGTCACTCCTGGCGAACCAGCCAGCATCTCCTGC |
| | | CGGTCGAGCCAGTCCCTCCTGCACTCCAATGGGTACAACTACCTCGAT |
| | | TGGTATCTGCAAAAGCCGGGCCAGAGCCCCCAGCTGCTGATCTACCTT |
| | | GGGTCAAACCGCGCTTCCGGGGTGCCTGATAGATTCTCCGGGTCCGGG |
| | | AGCGGAACCGACTTTACCCTGAAAATCTCGAGGGTGGAGGCCGAGGAC |
| | | GTCGGAGTGTACTACTGCATGCAGGCGCTCCAGACTCCCCTGACCTTC |
| | | GGAGGAGGAACGAAGGTCGACATCAAGACCACTACCCCAGCACCGAGG |
| | | CCACCCACCCCGGCTCCTACCATCGCCTCCCAGCCTCTGTCCCTGCGT |
| | | CCGGAGGCATGTAGACCCGCAGCTGGTGGGGCCGTGCATACCCGGGGT |
| | | CTTGACTTCGCCTGCGATATCTACATTTGGGCCCCTCTGGCTGGTACT |
| | | TGCGGGGTCCTGCTGCTTTCACTCGTGATCACTCTTTACTGTAAGCGC |
| | | GGTCGGAAGAAGCTGCTGTACATCTTTAAGCAACCCTTCATGAGGCCT |
| | | GTGCAGACTACTCAAGAGGAGGACGGCTGTTCATGCCGGTTCCCAGAG |
| | | GAGGAGGAAGGCGGCTGCGAACTGCGCGTGAAATTCAGCCGCAGCGCA |
| | | GATGCTCCAGCCTACAAGCAGGGGCAGAACCAGCTCTACAACGAACTC |
| | | AATCTTGGTCGGAGAGAGGAGTACGACGTGCTGGACAAGCGGAGAGGA |
| | | CGGGACCCAGAAATGGGCGGGAAGCCGCGCAGAAAGAATCCCCAAGAG |
| | | GGCCTGTACAACGAGCTCCAAAAGGATAAGATGGCAGAAGCCTATAGC |
| | | GAGATTGGTATGAAAGGGGAACGCAGAAGAGGCAAAGGCCACGACGGA |
| | | CTGTACCAGGGACTCAGCACCGCCACCAAGGACACCTATGACGCTCTT |
| | | CACATGCAGGCCCTGCCGCCTCGG |

BCMA_EBB-C1981-C3

| | | |
|---|---|---|
| BCMA_EBB- | 1171 | QVQLVESGGGLVQPGGSLRLSCAASGFTFSSYAMSWVRQAPGKGLEWV |
| C1981-C3-aa | | SAISGSGGSTYYADSVKGRFTISRDNSKNTLYLQMNSLRAEDTAVYYC |
| ScFv domain | | AKVGYDSSGYYRDYYGMDVWGQGTTVTVSSGGGGSGGGGSGGGGSEIV |
| | | LTQSPGTLSLSPGERATLSCRASQSVSSSYLAWYQQKPGQAPRLLIYG |
| | | TSSRATGISDRFSGSGSGTDFTLTISRLEPEDFAVYYCQHYGNSPPKF |
| | | TFGPGTKLEIK |
| BCMA_EBB- | 1172 | CAAGTGCAGCTCGTGGAGTCAGGCGGAGGACTGGTGCAGCCCGGGGGC |
| C1981-C3-nt | | TCCCTGAGACTTTCCTGCGCGGCATCGGGTTTTACCTTCTCCTCCTAT |
| ScFv domain | | GCTATGTCCTGGGTGCGCCAGGCCCCGGGAAAGGGACTGGAATGGGTG |
| | | TCCGCAATCAGCGGTAGCGGGGGCTCAACATACTACGCCGACTCCGTC |
| | | AAGGGTCGCTTCACTATTTCCCGGGACAACTCCAAGAATACCCTGTAC |
| | | CTCCAAATGAACAGCCTCAGGGCCGAGGATACTGCCGTGTACTACTGC |
| | | GCCAAAGTCGGATACGATAGCTCCGGTTACTACCGGGACTACTACGGA |
| | | ATGGACGTGTGGGGACAGGGCACCACCGTGACCGTGTCAAGCGGCGGA |
| | | GGCGGTTCAGGAGGGGGAGGCTCCGGCGGTGGAGGGTCCGAAATCGTC |
| | | CTGACTCAGTCGCCTGGCACTCTGTCGTTGTCCCCGGGGGAGCGCGCT |
| | | ACCCTGTCGTGTCGGGCGTCGCAGTCCGTGTCGAGCTCCTACCTCGCG |
| | | TGGTACCAGCAGAAGCCCGGACAGGCCCCTAGACTTCTGATCTACGGC |
| | | ACTTCTTCACGCGCCACCGGGATCAGCGACAGGTTCAGCGGCTCCGGC |
| | | TCCGGGACCGACTTCACCCTGACCATTAGCCGGCTGGAGCCTGAAGAT |
| | | TTCGCCGTGTATTACTGCCAACACTACGGAAACTCGCCGCCAAAGTTC |
| | | ACGTTCGGACCCGGAACCAAGCTGGAAATCAAG |
| BCMA_EBB- | 1173 | QVQLVESGGGLVQPGGSLRLSCAASGFTFSSYAMSWVRQAPGKGLEWV |
| C1981-C3-aa | | SAISGSGGSTYYADSVKGRFTISRDNSKNTLYLQMNSLRAEDTAVYYC |
| VH | | AKVGYDSSGYYRDYYGMDVWGQGTTVTVSS |
| BCMA_EBB- | 1174 | EIVLTQSPGTLSLSPGERATLSCRASQSVSSSYLAWYQQKPGQAPRLL |
| C1981-C3-aa | | IYGTSSRATGISDRFSGSGSGTDFTLTISRLEPEDFAVYYCQHYGNSP |
| VL | | PKFTFGPGTKLEIK |
| BCMA_EBB- | 1175 | MALPVTALLLPLALLLHAARPQVQLVESGGGLVQPGGSLRLSCAASGF |
| C1981-C3-aa | | TFSSYAMSWVRQAPGKGLEWVSAISGSGGSTYYADSVKGRFTISRDNS |
| Full CART | | KNTLYLQMNSLRAEDTAVYYCAKVGYDSSGYYRDYYGMDVWGQGTTVT |
| | | VSSGGGGSGGGGSGGGGSEIVLTQSPGTLSLSPGERATLSCRASQSVS |
| | | SSYLAWYQQKPGQAPRLLIYGTSSRATGISDRFSGSGSGTDFTLTISR |
| | | LEPEDFAVYYCQHYGNSPPKFTFGPGTKLEIKTTTPAPRPPTPAPTIA |
| | | SQPLSLRPEACRPAAGGAVHTRGLDFACDIYIWAPLAGTCGVLLLSLV |
| | | ITLYCKRGRKKLLYIFKQPFMRPVQTTQEEDGCSCRFPEEEEGGCELR |
| | | VKFSRSADAPAYKQGQNQLYNELNLGRREEYDVLDKRRGRDPEMGGKP |
| | | RRKNPQEGLYNELQKDKMAEAYSEIGMKGERRRGKGHDGLYQGLSTAT |
| | | KDTYDALHMQALPPR |
| BCMA_EBB- | 1176 | ATGGCCCTCCCTGTCACCGCCCTGCTGCTTCCGCTGGCTCTTCTGCTC |
| C1981-C3-nt | | CACGCCGCTCGGCCCCAAGTGCAGCTCGTGGAGTCAGGCGGAGGACTG |
| Full CART | | GTGCAGCCCGGGGGCTCCCTGAGACTTTCCTGCGCGGCATCGGGTTTT |
| | | ACCTTCTCCTCCTATGCTATGTCCTGGGTGCGCCAGGCCCCGGGAAAG |
| | | GGACTGGAATGGGTGTCCGCAATCAGCGGTAGCGGGGGCTCAACATAC |
| | | TACGCCGACTCCGTCAAGGGTCGCTTCACTATTTCCCGGGACAACTCC |
| | | AAGAATACCCTGTACCTCCAAATGAACAGCCTCAGGGCCGAGGATACT |
| | | GCCGTGTACTACTGCGCCAAAGTCGGATACGATAGCTCCGGTTACTAC |
| | | CGGGACTACTACGGAATGGACGTGTGGGGACAGGGCACCACCGTGACC |
| | | GTGTCAAGCGGCGGAGGCGGTTCAGGAGGGGGAGGCTCCGGCGGTGGA |
| | | GGGTCCGAAATCGTCCTGACTCAGTCGCCTGGCACTCTGTCGTTGTCC |
| | | CCGGGGGAGCGCGCTACCCTGTCGTGTCGGGCGTCGCAGTCCGTGTCG |
| | | AGCTCCTACCTCGCGTGGTACCAGCAGAAGCCCGGACAGGCCCCTAGA |
| | | CTTCTGATCTACGGCACTTCTTCACGCGCCACCGGGATCAGCGACAGG |
| | | TTCAGCGGCTCCGGCTCCGGGACCGACTTCACCCTGACCATTAGCCGG |
| | | CTGGAGCCTGAAGATTTCGCCGTGTATTACTGCCAACACTACGGAAAC |
| | | TCGCCGCCAAAGTTCACGTTCGGACCCGGAACCAAGCTGGAAATCAAG |
| | | ACCACTACCCCAGCACCGAGGCCACCCACCCCGGCTCCTACCATCGCC |
| | | TCCCAGCCTCTGTCCCTGCGTCCGGAGGCATGTAGACCCGCAGCTGGT |
| | | GGGGCCGTGCATACCCGGGGTCTTGACTTCGCCTGCGATATCTACATT |
| | | TGGGCCCCTCTGGCTGGTACTTGCGGGGTCCTGCTGCTTTCACTCGTG |
| | | ATCACTCTTTACTGTAAGCGCGGTCGGAAGAAGCTGCTGTACATCTTT |
| | | AAGCAACCCTTCATGAGGCCTGTGCAGACTACTCAAGAGGAGGACGGC |
| | | TGTTCATGCCGGTTCCCAGAGGAGGAGGAAGGCGGCTGCGAACTGCGC |
| | | GTGAAATTCAGCCGCAGCGCAGATGCTCCAGCCTACAAGCAGGGGCAG |
| | | AACCAGCTCTACAACGAACTCAATCTTGGTCGGAGAGAGGAGTACGAC |
| | | GTGCTGGACAAGCGGAGAGGACGGGACCCAGAAATGGGCGGGAAGCCG |
| | | CGCAGAAAGAATCCCCAAGAGGGCCTGTACAACGAGCTCCAAAAGGAT |
| | | AAGATGGCAGAAGCCTATAGCGAGATTGGTATGAAAGGGGAACGCAGA |
| | | AGAGGCAAAGGCCACGACGGACTGTACCAGGGACTCAGCACCGCCACC |
| | | AAGGACACCTATGACGCTCTTCACATGCAGGCCCTGCCGCCTCGG |

BCMA_EBB-C1978-G4

| | | |
|---|---|---|
| BCMA_EBB- | 1177 | EVQLVESGGGLVQPGGSLRLSCAASGFTFSSYAMSWVRQAPGKGLEWV |
| C1978-G4-aa | | SAISGSGGSTYYADSVKGRFTISRDNSKNTLYLQMNSLRAEDTAVYYC |
| ScFv domain | | AKMGWSSGYLGAFDIWGQGTTVTVSSGGGGSGGGGSGGGGSEIVLTQS |
| | | PGTLSLSPGERATLSCRASQSVASSFLAWYQQKPGQAPRLLIYGASGR |
| | | ATGIPDRFSGSGSGTDFTLTISRLEPEDFAVYYCQHYGGSPRLTFGGG |
| | | TKVDIK |
| BCMA_EBB- | 1178 | GAAGTCCAACTGGTGGAGTCCGGGGGAGGGCTCGTGCAGCCCGGAGGC |
| C1978-G4-nt | | AGCCTTCGGCTGTCGTGCGCCGCCTCCGGGTTCACGTTCTCATCCTAC |
| ScFv domain | | GCGATGTCGTGGGTCAGACAGGCACCAGGAAAGGGACTGGAATGGGTG |
| | | TCCGCCATTAGCGGCTCCGGCGGTAGCACCTACTATGCCGACTCAGTG |
| | | AAGGGAAGGTTCACTATCTCCCGCGACAACAGCAAGAACACCCTGTAC |
| | | CTCCAAATGAACTCTCTGCGGGCCGAGGATACCGCGGTGTACTATTGC |
| | | GCCAAGATGGGTTGGTCCAGCGGATACTTGGGAGCCTTCGACATTTGG |
| | | GGACAGGGCACTACTGTGACCGTGTCCTCCGGGGGTGGCGGATCGGGA |
| | | GGCGGCGGCTCGGGTGGAGGGGGTTCCGAAATCGTGTTGACCCAGTCA |
| | | CCGGGAACCCTCTCGCTGTCCCCGGGAGAACGGGCTACACTGTCATGT |
| | | AGAGCGTCCCAGTCCGTGGCTTCCTCGTTCCTGGCCTGGTACCAGCAG |
| | | AAGCCGGGACAGGCACCCCGCCTGCTCATCTACGGAGCCAGCGGCCGG |
| | | GCGACCGGCATCCCTGACCGCTTCTCCGGTTCCGGCTCGGGCACCGAC |
| | | TTTACTCTGACCATTAGCAGGCTTGAGCCCGAGGATTTTGCCGTGTAC |
| | | TACTGCCAACACTACGGGGGGAGCCCTCGCCTGACCTTCGGAGGCGGA |
| | | ACTAAGGTCGATATCAAAA |
| BCMA_EBB- | 1179 | EVQLVESGGGLVQPGGSLRLSCAASGFTFSSYAMSWVRQAPGKGLEWV |
| C1978-G4-aa | | SAISGSGGSTYYADSVKGRFTISRDNSKNTLYLQMNSLRAEDTAVYYC |
| VH | | AKMGWSSGYLGAFDIWGQGTTVTVSS |
| BCMA_EBB- | 1180 | EIVLTQSPGTLSLSPGERATLSCRASQSVASSFLAWYQQKPGQAPRLL |
| C1978-G4-aa | | IYGASGRATGIPDRFSGSGSGTDFTLTISRLEPEDFAVYYCQHYGGSP |
| VL | | RLTFGGGTKVDIK |
| BCMA_EBB- | 1181 | MALPVTALLLPLALLLHAARPEVQLVESGGGLVQPGGSLRLSCAASGF |
| C1978-G4-aa | | TFSSYAMSWVRQAPGKGLEWVSAISGSGGSTYYADSVKGRFTISRDNS |
| Full CART | | KNTLYLQMNSLRAEDTAVYYCAKMGWSSGYLGAFDIWGQGTTVTVSSG |
| | | GGGSGGGGSGGGGSEIVLTQSPGTLSLSPGERATLSCRASQSVASSFL |
| | | AWYQQKPGQAPRLLIYGASGRATGIPDRFSGSGSGTDFTLTISRLEPE |
| | | DFAVYYCQHYGGSPRLTFGGGTKVDIKTTTPAPRPPTPAPTIASQPLS |
| | | LRPEACRPAAGGAVHTRGLDFACDIYIWAPLAGTCGVLLLSLVITLYC |
| | | KRGRKKLLYIFKQPFMRPVQTTQEEDGCSCRFPEEEEGGCELRVKFSR |
| | | SADAPAYKQGQNQLYNELNLGRREEYDVLDKRRGRDPEMGGKPRRKNP |
| | | QEGLYNELQKDKMAEAYSEIGMKGERRRGKGHDGLYQGLSTATKDTYD |
| | | ALHMQALPPR |
| BCMA_EBB- | 1182 | ATGGCCCTCCCTGTCACCGCCCTGCTGCTTCCGCTGGCTCTTCTGCTC |
| C1978-G4-nt | | CACGCCGCTCGGCCCGAAGTCCAACTGGTGGAGTCCGGGGGAGGGCTC |
| Full CART | | GTGCAGCCCGGAGGCAGCCTTCGGCTGTCGTGCGCCGCCTCCGGGTTC |
| | | ACGTTCTCATCCTACGCGATGTCGTGGGTCAGACAGGCACCAGGAAAG |
| | | GGACTGGAATGGGTGTCCGCCATTAGCGGCTCCGGCGGTAGCACCTAC |
| | | TATGCCGACTCAGTGAAGGGAAGGTTCACTATCTCCCGCGACAACAGC |
| | | AAGAACACCCTGTACCTCCAAATGAACTCTCTGCGGGCCGAGGATACC |
| | | GCGGTGTACTATTGCGCCAAGATGGGTTGGTCCAGCGGATACTTGGGA |
| | | GCCTTCGACATTTGGGGACAGGGCACTACTGTGACCGTGTCCTCCGGG |
| | | GGTGGCGGATCGGGAGGCGGCGGCTCGGGTGGAGGGGGTTCCGAAATC |
| | | GTGTTGACCCAGTCACCGGGAACCCTCTCGCTGTCCCCGGGAGAACGG |
| | | GCTACACTGTCATGTAGAGCGTCCCAGTCCGTGGCTTCCTCGTTCCTG |
| | | GCCTGGTACCAGCAGAAGCCGGGACAGGCACCCCGCCTGCTCATCTAC |
| | | GGAGCCAGCGGCCGGGCGACCGGCATCCCTGACCGCTTCTCCGGTTCC |
| | | GGCTCGGGCACCGACTTTACTCTGACCATTAGCAGGCTTGAGCCCGAG |
| | | GATTTTGCCGTGTACTACTGCCAACACTACGGGGGGAGCCCTCGCCTG |
| | | ACCTTCGGAGGCGGAACTAAGGTCGATATCAAAACCACTACCCCAGCA |
| | | CCGAGGCCACCCACCCCGGCTCCTACCATCGCCTCCCAGCCTCTGTCC |
| | | CTGCGTCCGGAGGCATGTAGACCCGCAGCTGGTGGGGCCGTGCATACC |
| | | CGGGGTCTTGACTTCGCCTGCGATATCTACATTTGGGCCCCTCTGGCT |
| | | GGTACTTGCGGGGTCCTGCTGCTTTCACTCGTGATCACTCTTTACTGT |
| | | AAGCGCGGTCGGAAGAAGCTGCTGTACATCTTTAAGCAACCCTTCATG |
| | | AGGCCTGTGCAGACTACTCAAGAGGAGGACGGCTGTTCATGCCGGTTC |
| | | CCAGAGGAGGAGGAAGGCGGCTGCGAACTGCGCGTGAAATTCAGCCGC |
| | | AGCGCAGATGCTCCAGCCTACAAGCAGGGGCAGAACCAGCTCTACAAC |
| | | GAACTCAATCTTGGTCGGAGAGAGGAGTACGACGTGCTGGACAAGCGG |
| | | AGAGGACGGGACCCAGAAATGGGCGGGAAGCCGCGCAGAAAGAATCCC |
| | | CAAGAGGGCCTGTACAACGAGCTCCAAAAGGATAAGATGGCAGAAGCC |
| | | TATAGCGAGATTGGTATGAAAGGGGAACGCAGAAGAGGCAAAGGCCAC |
| | | GACGGACTGTACCAGGGACTCAGCACCGCCACCAAGGACACCTATGAC |
| | | GCTCTTCACATGCAGGCCCTGCCGCCTCGG |

TABLE 11B
Additional exemplary BCMA CAR sequences

| | | SEQ |
|---|---|---|
| | | ID |
| Name | Sequence | NO: |
| A7D12.2 | QIQLVQSGPDLKKPGETVKLSCKASGYTFTNFGMNWVKQAPGKGFKWMAWINTYTGESYFA | 1183 |
| VH | DDFKGRFAFSVETSATTAYLQINNLKTEDTATYFCARGEIYYGYDGGFAYWGQGTLVTVSA | |
| A7D12.2 | DVVMTQSHRFMSTSVGDRVSITCRASQDVNTAVSWYQQKPGQSPKLLIFSASYRYTGVPDR | 1184 |
| VL | FTGSGSGADFTLTISSVQAEDLAVYYCQQHYSTPWTFGGGTKLDIK | |
| A7D12.2 | QIQLVQSGPDLKKPGETVKLSCKASGYTFTNFGMNWVKQAPGKGFKWMAWINTYTGESYFA | 1185 |
| scFv | DDFKGRFAFSVETSATTAYLQINNLKTEDTATYFCARGEIYYGYDGGFAYWGQGTLVTVSA | |
| domain | GGGGSGGGGSGGGGSDVVMTQSHRFMSTSVGDRVSITCRASQDVNTAVSWYQQKPGQSPKL | |
| | LIFSASYRYTGVPDRFTGSGSGADFTLTISSVQAEDLAVYYCQQHYSTPWTFGGGTKLDIK | |
| A7D12.2 | QIQLVQSGPDLKKPGETVKLSCKASGYTFTNFGMNWVKQAPGKGFKWMAWINTYTGESYFA | 1186 |
| Full | DDFKGRFAFSVETSATTAYLQINNLKTEDTATYFCARGEIYYGYDGGFAYWGQGTLVTVSA | |
| CART | GGGGSGGGGSGGGGSDVVMTQSHRFMSTSVGDRVSITCRASQDVNTAVSWYQQKPGQSPKL | |
| | LIFSASYRYTGVPDRFTGSGSGADFTLTISSVQAEDLAVYYCQQHYSTPWTFGGGTKLDIK | |
| | TTTPAPRPPTPAPTIASQPLSLRPEACRPAAGGAVHTRGLDFACDIYIWAPLAGTCGVLLL | |
| | SLVITLYCKRGRKKLLYIFKQPFMRPVQTTQEEDGCSCRFPEEEEGGCELRVKFSRSADAP | |
| | AYKQGQNQLYNELNLGRREEYDVLDKRRGRDPEMGGKPRRKNPQEGLYNELQKDKMAEAYS | |
| | EIGMKGERRRGKGHDGLYQGLSTATKDTYDALHMQALPPR | |
| C11D5.3 | QIQLVQSGPELKKPGETVKISCKASGYTFTDYSINWVKRAPGKGLKWMGWINTETREPAYA | 1187 |
| VH | YDFRGRFAFSLETSASTAYLQINNLKYEDTATYFCALDYSYAMDYWGQGTSVTVSS | |
| C11D5.3 | DIVLTQSPASLAMSLGKRATISCRASESVSVIGAHLIHWYQQKPGQPPKLLIYLASNLETG | 1188 |
| VL | VPARFSGSGSGTDFTLTIDPVEEDDVAIYSCLQSRIFPRTFGGGTKLEIK | |
| C11D5.3 | QIQLVQSGPELKKPGETVKISCKASGYTFTDYSINWVKRAPGKGLKWMGWINTETREPAYA | 1189 |
| scFv | YDFRGRFAFSLETSASTAYLQINNLKYEDTATYFCALDYSYAMDYWGQGTSVTVSSGGGGS | |
| domain | GGGGSGGGGSQIQLVQSGPELKKPGETVKISCKASGYTFTDYSINWVKRAPGKGLKWMGWI | |
| | NTETREPAYAYDFRGRFAFSLETSASTAYLQINNLKYEDTATYFCALDYSYAMDYWGQGTS | |
| | VTVSS | |
| C11D5.3 | QIQLVQSGPELKKPGETVKISCKASGYTFTDYSINWVKRAPGKGLKWMGWINTETREPAYA | 1190 |
| Full | YDFRGRFAFSLETSASTAYLQINNLKYEDTATYFCALDYSYAMDYWGQGTSVTVSSGGGGS | |
| CART | GGGGSGGGGSQIQLVQSGPELKKPGETVKISCKASGYTFTDYSINWVKRAPGKGLKWMGWI | |
| | NTETREPAYAYDFRGRFAFSLETSASTAYLQINNLKYEDTATYFCALDYSYAMDYWGQGTS | |
| | VTVSSTTTPAPRPPTPAPTIASQPLSLRPEACRPAAGGAVHTRGLDFACDIYIWAPLAGTC | |
| | GVLLLSLVITLYCKRGRKKLLYIFKQPFMRPVQTTQEEDGCSCRFPEEEEGGCELRVKFSR | |
| | SADAPAYKQGQNQLYNELNLGRREEYDVLDKRRGRDPEMGGKPRRKNPQEGLYNELQKDKM | |
| | AEAYSEIGMKGERRRGKGHDGLYQGLSTATKDTYDALHMQALPPR | |
| C12A3.2 | QIQLVQSGPELKKPGETVKISCKASGYTFRHYSMNWVKQAPGKGLKWMGRINTESGVPIYA | 1191 |
| VH | DDFKGRFAFSVETSASTAYLVINNLKDEDTASYFCSNDYLYSLDFWGQGTALTVSS | |
| C12A3.2 | DIVLTQSPPSLAMSLGKRATISCRASESVTILGSHLIYWYQQKPGQPPTLLIQLASNVQTG | 1192 |
| VL | VPARFSGSGSRTDFTLTIDPVEEDDVAVYYCLQSRTIPRTFGGGTKLEIK | |
| C12A3.2 | QIQLVQSGPELKKPGETVKISCKASGYTFRHYSMNWVKQAPGKGLKWMGRINTESGVPIYA | 1193 |
| scFv | DDFKGRFAFSVETSASTAYLVINNLKDEDTASYFCSNDYLYSLDFWGQGTALTVSSGGGGS | |
| domain | GGGGSGGGGSDIVLTQSPPSLAMSLGKRATISCRASESVTILGSHLIYWYQQKPGQPPTLL | |
| | IQLASNVQTGVPARFSGSGSRTDFTLTIDPVEEDDVAVYYCLQSRTIPRTFGGGTKLEIK | |
| C12A3.2 | QIQLVQSGPELKKPGETVKISCKASGYTFRHYSMNWVKQAPGKGLKWMGRINTESGVPIYA | 1194 |
| Full | DDFKGRFAFSVETSASTAYLVINNLKDEDTASYFCSNDYLYSLDFWGQGTALTVSSGGGGS | |
| CART | GGGGSGGGGSDIVLTQSPPSLAMSLGKRATISCRASESVTILGSHLIYWYQQKPGQPPTLL | |
| | IQLASNVQTGVPARFSGSGSRTDFTLTIDPVEEDDVAVYYCLQSRTIPRTFGGGTKLEIKT | |
| | TTPAPRPPTPAPTIASQPLSLRPEACRPAAGGAVHTRGLDFACDIYIWAPLAGTCGVLLLS | |
| | LVITLYCKRGRKKLLYIFKQPFMRPVQTTQEEDGCSCRFPEEEEGGCELRVKFSRSADAPA | |
| | YKQGQNQLYNELNLGRREEYDVLDKRRGRDPEMGGKPRRKNPQEGLYNELQKDKMAEAYSE | |
| | IGMKGERRRGKGHDGLYQGLSTATKDTYDALHMQALPPR | |
| C13F12.1 | QIQLVQSGPELKKPGETVKISCKASGYTFTHYSMNWVKQAPGKGLKWMGRINTETGEPLYA | 1195 |
| VH | DDFKGRFAFSLETSASTAYLVINNLKNEDTATFFCSNDYLYSCDYWGQGTTLTVSS | |
| C13F12.1 | DIVLTQSPPSLAMSLGKRATISCRASESVTILGSHLIYWYQQKPGQPPTLLIQLASNVQTG | 1196 |
| VL | VPARFSGSGSRTDFTLTIDPVEEDDVAVYYCLQSRTIPRTFGGGTKLEIK | |
| C13F12.1 | QIQLVQSGPELKKPGETVKISCKASGYTFTHYSMNWVKQAPGKGLKWMGRINTETGEPLYA | 1197 |
| scFv | DDFKGRFAFSLETSASTAYLVINNLKNEDTATFFCSNDYLYSCDYWGQGTTLTVSSGGGGS | |
| domain | GGGGSGGGGSDIVLTQSPPSLAMSLGKRATISCRASESVTILGSHLIYWYQQKPGQPPTLL | |
| | IQLASNVQTGVPARFSGSGSRTDFTLTIDPVEEDDVAVYYCLQSRTIPRTFGGGTKLEIK | |
| C13F12.1 | QIQLVQSGPELKKPGETVKISCKASGYTFTHYSMNWVKQAPGKGLKWMGRINTETGEPLYA | 1198 |
| Full | DDFKGRFAFSLETSASTAYLVINNLKNEDTATFFCSNDYLYSCDYWGQGTTLTVSSGGGGS | |
| CART | GGGGSGGGGSDIVLTQSPPSLAMSLGKRATISCRASESVTILGSHLIYWYQQKPGQPPTLL | |
| | IQLASNVQTGVPARFSGSGSRTDFTLTIDPVEEDDVAVYYCLQSRTIPRTFGGGTKLEIKT | |
| | TTPAPRPPTPAPTIASQPLSLRPEACRPAAGGAVHTRGLDFACDIYIWAPLAGTCGVLLLS | |
| | LVITLYCKRGRKKLLYIFKQPFMRPVQTTQEEDGCSCRFPEEEEGGCELRVKFSRSADAPA | |
| | YKQGQNQLYNELNLGRREEYDVLDKRRGRDPEMGGKPRRKNPQEGLYNELQKDKMAEAYSE | |
| | IGMKGERRRGKGHDGLYQGLSTATKDTYDALHMQALPPR | |

[0912] Exemplary BCMA CAR constructs disclose herein comprise an scFv (e.g., a scFv as disclosed in Tables 11A or 11B, optionally preceded with an optional leader sequence (e.g., SEQ ID NO: 2 and SEQ ID NO: 3 or 1938 for exemplary leader amino acid and nucleotide sequences, respectively). The sequences of the scFv fragments (e.g., an ScFv from any of SEQ ID NOs: 967-1182, e.g., SEQ ID NOs: 967, 973, 979, 985, 991, 997, 1003, 1009, 1015, 1021, 1027, 1033, 1039, 1045, 1051, 1057, 1063, 1069, 1075, 1081, 1087, 1093, 1099, 1105, 1111, 1117, 1123, 1129, 1135, 1141, 1147, 1153, 1159, 1165, 1171, 1177, not including the optional leader sequence) are provided herein in Tables 11A or 11B. The BCMA CAR construct can further include an optional hinge domain, e.g., a CD8 hinge domain (e.g., including the amino acid sequence of SEQ ID NO: 4 or encoded by a nucleic acid sequence of SEQ ID NO: 5); a transmembrane domain, e.g., a CD8 transmembrane domain (e.g., including the amino acid sequence of SEQ ID NO: 12 or encoded by the nucleotide sequence of SEQ ID NO: 13 or 1939); an intracellular domain, e.g., a 4-1BB intracellular domain (e.g., including the amino acid sequence of SEQ ID NO: 14 or encoded by the nucleotide sequence of SEQ ID NO: 15 or 1940; and a functional signaling domain, e.g., a CD3 zeta domain (e.g., including amino acid sequence of SEQ ID NO: 18 or 20, or encoded by the nucleotide sequence of SEQ ID NO: 19, 1941, or 21). In certain embodiments, the domains are contiguous with and in the same reading frame to form a single fusion protein. In other embodiments, the domain are in separate polypeptides, e.g., as in an RCAR molecule as described herein.

[0913] In certain embodiments, the full length BCMA CAR molecule includes the amino acid sequence of, or is encoded by the nucleotide sequence of, BCMA-1, BCMA-2, BCMA-3, BCMA-4, BCMA-5, BCMA-6, BCMA-7, BCMA-8, BCMA-9, BCMA-10, BCMA-11, BCMA-12, BCMA-13, BCMA-14, BCMA-15, 149362, 149363, 149364, 149365, 149366, 149367, 149368, 149369, BCMA_EBB-C1978-A4, BCMA_EBB-C1978-G1, BCMA_EBB-C1979-C1, BCMA_EBB-C1978-C7, BCMA_EBB-C1978-D10, BCMA_EBB-C1979-C12, BCMA_EBB-C1980-G4, BCMA_EBB-C1980-D2, BCMA_EBB-C1978-A10, BCMA_EBB-C1978-D4, BCMA_EBB-C1980-A2, BCMA_EBB-C1981-C3, BCMA_EBB-C1978-G4, A7D12.2, C11D5.3, C12A3.2, or C13F12.1 provided in Table 11A or 11B, or a sequence substantially (e.g., 85%, 95-99% or higher) identical thereto.

[0914] In certain embodiments, the BCMA CAR molecule, or the anti-BCMA antigen binding domain, includes the scFv amino acid sequence of BCMA-1, BCMA-2, BCMA-3, BCMA-4, BCMA-5, BCMA-6, BCMA-7, BCMA-8, BCMA-9, BCMA-10, BCMA-11, BCMA-12, BCMA-13, BCMA-14, BCMA-15, 149362, 149363, 149364, 149365, 149366, 149367, 149368, 149369, BCMA_EBB-C1978-A4, BCMA_EBB-C1978-G1, BCMA_EBB-C1979-C1, BCMA_EBB-C1978-C7, BCMA_EBB-C1978-D10, BCMA_EBB-C1979-C12, BCMA_EBB-C1980-G4, BCMA_EBB-C1980-D2, BCMA_EBB-C1978-A10, BCMA_EBB-C1978-D4, BCMA_EBB-C1980-A2, BCMA_EBB-C1981-C3, BCMA_EBB-C1978-G4, A7D12.2, C11D5.3, C12A3.2, or C13F12.1 provided in Table 11A or 11B (with or without the leader sequence), or a sequence substantially identical (e.g., 85%, 95-99% or higher identical, or up to 20, 15, 10, 8, 6, 5, 4, 3, 2, or 1 amino acid changes, e.g., substitutions (e.g., conservative substitutions)) to any of the aforesaid sequences.

[0915] In certain embodiments, the BCMA CAR molecule, or the anti-BCMA antigen binding domain, includes the heavy chain variable region and/or the light chain variable region of BCMA-1, BCMA-2, BCMA-3, BCMA-4, BCMA-5, BCMA-6, BCMA-7, BCMA-8, BCMA-9, BCMA-10, BCMA-11, BCMA-12, BCMA-13, BCMA-14, BCMA-15, 149362, 149363, 149364, 149365, 149366, 149367, 149368, 149369, BCMA_EBB-C1978-A4, BCMA_EBB-C1978-G1, BCMA_EBB-C1979-C1, BCMA_EBB-C1978-C7, BCMA_EBB-C1978-D10, BCMA_EBB-C1979-C12, BCMA_EBB-C1980-G4, BCMA_EBB-C1980-D2, BCMA_EBB-C1978-A10, BCMA_EBB-C1978-D4, BCMA_EBB-C1980-A2, BCMA_EBB-C1981-C3, BCMA_EBB-C1978-G4, A7D12.2, C11D5.3, C12A3.2, or C13F12.1 provided in Table 11A or 11B, or a sequence substantially identical (e.g., 85%, 95-99% or higher identical, or up to 20, 15, 10, 8, 6, 5, 4, 3, 2, or 1 amino acid changes, e.g., substitutions (e.g., conservative substitutions)) to any of the aforesaid sequences.

[0916] In certain embodiments, the BCMA CAR molecule, or the anti-BCMA antigen binding domain, includes one, two or three CDRs from the heavy chain variable region (e.g., HCDR1, HCDR2 and/or HCDR3), provided in Table 12; and/or one, two or three CDRs from the light chain variable region (e.g., LCDR1, LCDR2 and/or LCDR3) of BCMA-1, BCMA-2, BCMA-3, BCMA-4, BCMA-5, BCMA-6, BCMA-7, BCMA-8, BCMA-9, BCMA-10, BCMA-11, BCMA-12, BCMA-13, BCMA-14, BCMA-15, 149362, 149363, 149364, 149365, 149366, 149367, 149368, 149369, BCMA_EBB-C1978-A4, BCMA_EBB-C1978-G1, BCMA_EBB-C1979-C1, BCMA_EBB-C1978-C7, BCMA_EBB-C1978-D10, BCMA_EBB-C1979-C12, BCMA_EBB-C1980-G4, BCMA_EBB-C1980-D2, BCMA_EBB-C1978-A10, BCMA_EBB-C1978-D4, BCMA_EBB-C1980-A2, BCMA_EBB-C1981-C3, BCMA_EBB-C1978-G4, A7D12.2, C11D5.3, C12A3.2, or C13F12.1, provided in Table 13; or a sequence substantially identical (e.g., 85%, 95-99% or higher identical, or up to 20, 15, 10, 8, 6, 5, 4, 3, 2, or 1 amino acid changes, e.g., substitutions (e.g., conservative substitutions)) to any of the aforesaid sequences.

[0917] In certain embodiments, the BCMA CAR molecule, or the anti-BCMA antigen binding domain, includes one, two or three CDRs from the heavy chain variable region (e.g., HCDR1, HCDR2 and/or HCDR3), provided in Table 14; and/or one, two or three CDRs from the light chain variable region (e.g., LCDR1, LCDR2 and/or LCDR3) of BCMA-1, BCMA-2, BCMA-3, BCMA-4, BCMA-5, BCMA-6, BCMA-7, BCMA-8, BCMA-9, BCMA-10, BCMA-11, BCMA-12, BCMA-13, BCMA-14, BCMA-15, 149362, 149363, 149364, 149365, 149366, 149367, 149368, 149369, BCMA_EBB-C1978-A4, BCMA_EBB-C1978-G1, BCMA_EBB-C1979-C1, BCMA_EBB-C1978-C7, BCMA_EBB-C1978-D10, BCMA_EBB-C1979-C12, BCMA_EBB-C1980-G4, BCMA_EBB-C1980-D2, BCMA_EBB-C1978-A10, BCMA_EBB-C1978-D4, BCMA_EBB-C1980-A2, BCMA_EBB-C1981-C3, BCMA_EBB-C1978-G4, A7D12.2, C11D5.3, C12A3.2, or C13F12.1, provided in Table 15; or a sequence substantially identical (e.g., 85%, 95-99% or higher identical, or up to 20, 15, 10, 8, 6, 5, 4, 3, 2, or 1 amino acid changes, e.g., substitutions (e.g., conservative substitutions)) to any of the aforesaid sequences.

[0918] In certain embodiments, the BCMA CAR molecule, or the anti-BCMA antigen binding domain, includes one, two or three CDRs from the heavy chain variable region (e.g., HCDR1, HCDR2 and/or HCDR3), provided in Table 16; and/or one, two or three CDRs from the light chain variable region (e.g., LCDR1, LCDR2 and/or LCDR3) of BCMA-1, BCMA-2, BCMA-3, BCMA-4, BCMA-5, BCMA-6, BCMA-7, BCMA-8, BCMA-9, BCMA-10, BCMA-11, BCMA-12, BCMA-13, BCMA-14, BCMA-15, 149362, 149363, 149364, 149365, 149366, 149367, 149368, 149369, BCMA_EBB-C1978-A4, BCMA_EBB-C1978-G1, BCMA_EBB-C1979-C1, BCMA_EBB-C1978-C7, BCMA_EBB-C1978-D10, BCMA_EBB-C1979-C12, BCMA_EBB-C1980-G4, BCMA_EBB-C1980-D2, BCMA_EBB-C1978-A10, BCMA_EBB-C1978-D4, BCMA_EBB-C1980-A2, BCMA_EBB-C1981-C3, BCMA_EBB-C1978-G4, A7D12.2, C11D5.3, C12A3.2, or C13F12.1, provided in Table 17; or a sequence substantially identical (e.g., 85%, 95-99% or higher identical, or up to 20, 15, 10, 8, 6, 5, 4, 3, 2, or 1 amino acid changes, e.g., substitutions (e.g., conservative substitutions)) to any of the aforesaid sequences.

[0919] The sequences of human CDR sequences of the scFv domains are shown in Tables 12, 14, and 16 for the heavy chain variable domains and in Tables 13, 15, and 17 for the light chain variable domains. “ID” stands for the respective SEQ ID NO for each CDR.

TABLE 12
Heavy Chain Variable Domain CDRs according to the Kabat
numbering scheme (Kabat et al. (1991), “Sequences of Proteins
of Immunological Interest,” 5th Ed. Public Health Service,
National Institutes of Health, Bethesda, MD)

| Candidate | HCDR1 | ID | HCDR2 | ID | HCDR3 | ID |
|---|---|---|---|---|---|---|
| 139109 | NHGMS | 1199 | GIVYSGSTYYAASVKG | 1239 | HGGESDV | 1279 |
| 139103 | NYAMS | 1200 | GISRSGENTYYADSVKG | 1240 | SPAHYYGGMDV | 1280 |
| 139105 | DYAMH | 1201 | GISWNSGSIGYADSVKG | 1241 | HSFLAY | 1281 |
| 139111 | NHGMS | 1202 | GIVYSGSTYYAASVKG | 1242 | HGGESDV | 1282 |
| 139100 | NFGIN | 1203 | WINPKNNNTNYAQKFQG | 1243 | GPYYYQSYMDV | 1283 |
| 139101 | SDAMT | 1204 | VISGSGGTTYYADSVKG | 1244 | LDSSGYYYARGPRY | 1284 |
| 139102 | NYGIT | 1205 | WISAYNGNTNYAQKFQG | 1245 | GPYYYYMDV | 1285 |
| 139104 | NHGMS | 1206 | GIVYSGSTYYAASVKG | 1246 | HGGESDV | 1286 |
| 139106 | NHGMS | 1207 | GIVYSGSTYYAASVKG | 1247 | HGGESDV | 1287 |
| 139107 | NHGMS | 1208 | GIVYSGSTYYAASVKG | 1248 | HGGESDV | 1288 |
| 139108 | DYYMS | 1209 | YISSSGSTIYYADSVKG | 1249 | ESGDGMDV | 1289 |
| 139110 | DYYMS | 1210 | YISSSGNTIYYADSVKG | 1250 | STMVREDY | 1290 |
| 139112 | NHGMS | 1211 | GIVYSGSTYYAASVKG | 1251 | HGGESDV | 1291 |
| 139113 | NHGMS | 1212 | GIVYSGSTYYAASVKG | 1252 | HGGESDV | 1292 |
| 139114 | NHGMS | 1213 | GIVYSGSTYYAASVKG | 1253 | HGGESDV | 1293 |
| 149362 | SSYYYWG | 1214 | SIYYSGSAYYNPSLKS | 1254 | HWQEWPDAFDI | 1294 |
| 149363 | TSGMCVS | 1215 | RIDWDEDKFYSTSLKT | 1255 | SGAGGTSATAFDI | 1295 |
| 149364 | SYSMN | 1216 | SISSSSSYIYYADSVKG | 1256 | TIAAVYAFDI | 1296 |
| 149365 | DYYMS | 1217 | YISSSGSTIYYADSVKG | 1257 | DLRGAFDI | 1297 |
| 149366 | SHYIH | 1218 | MINPSGGVTAYSQTLQG | 1258 | EGSGSGWYFDF | 1298 |
| 149367 | SGGYYWS | 1219 | YIYYSGSTYYNPSLKS | 1259 | AGIAARLRGAFDI | 1299 |
| 149368 | SYAIS | 1220 | GIIPIFGTANYAQKFQG | 1260 | RGGYQLLRWDVGLLR | 1300 |
| | | | | | SAFDI | |
| 149369 | SNSAAWN | 1221 | RTYYRSKWYSFYAISLKS | 1261 | SSPEGLFLYWFDP | 1301 |
| BCMA_EBB- | SYAMS | 1222 | AISGSGGSTYYADSVKG | 1262 | VEGSGSLDY | 1302 |
| C1978-A4 | | | | | | |
| BCMA_EBB- | RYPMS | 1223 | GISDSGVSTYYADSAKG | 1263 | RAGSEASDI | 1303 |
| C1978-G1 | | | | | | |
| BCMA_EBB- | SYAMS | 1224 | AISGSGGSTYYADSVKG | 1264 | ATYKRELRYYYGMDV | 1304 |
| C1979-C1 | | | | | | |
| BCMA_EBB- | SYAMS | 1225 | AISGSGGSTYYADSVKG | 1265 | ATYKRELRYYYGMDV | 1305 |
| C1978-C7 | | | | | | |
| BCMA_EBB- | DYAMH | 1226 | GISWNSGSIGYADSVKG | 1266 | VGKAVPDV | 1306 |
| C1978-D10 | | | | | | |
| BCMA_EBB- | DYAMH | 1227 | SINWKGNSLAYGDSVKG | 1267 | HQGVAYYNYAMDV | 1307 |
| C1979-C12 | | | | | | |
| BCMA_EBB- | SYAMS | 1228 | AISGSGGSTYYADSVKG | 1268 | VVRDGMDV | 1308 |
| C1980-G4 | | | | | | |
| BCMA_EBB- | SYAMS | 1229 | AISGSGGSTYYADSVKG | 1269 | IPQTGTFDY | 1309 |
| C1980-D2 | | | | | | |
| BCMA_EBB- | SYAMS | 1230 | AISGSGGSTYYADSVKG | 1270 | ANYKRELRYYYGMDV | 1310 |
| C1978-A10 | | | | | | |
| BCMA_EBB- | SYAMS | 1231 | AISGSGGSTYYADSVKG | 1271 | ALVGATGAFDI | 1311 |
| C1978-D4 | | | | | | |
| BCMA_EBB- | SYAMS | 1232 | AISGSGGSTYYADSVKG | 1272 | WFGEGFDP | 1312 |
| C1980-A2 | | | | | | |
| BCMA_EBB- | SYAMS | 1233 | AISGSGGSTYYADSVKG | 1273 | VGYDSSGYYRDYYGM | 1313 |
| C1981-C3 | | | | | DV | |
| BCMA_EBB- | SYAMS | 1234 | AISGSGGSTYYADSVKG | 1274 | MGWSSGYLGAFDI | 1314 |
| C1978-G4 | | | | | | |
| A7D12.2 | NFGMN | 1235 | WINTYTGESYFADDFKG | 1275 | GEIYYGYDGGFAY | 1315 |
| C11D5.3 | DYSIN | 1236 | WINTETREPAYAYDFRG | 1276 | DYSYAMDY | 1316 |
| C12A3.2 | HYSMN | 1237 | RINTESGVPIYADDFKG | 1277 | DYLYSLDF | 1317 |
| C13F12.1 | HYSMN | 1238 | RINTETGEPLYADDFKG | 1278 | DYLYSCDY | 1318 |

TABLE 13
Light Chain Variable Domain CDRs according to the Kabat
numbering scheme (Kabat et al. (1991), “Sequences of
Proteins of Immunological Interest,” 5th Ed. Public
Health Service, National Institutes of Health, Bethesda, MD)

| Candidate | LCDR1 | ID | LCDR2 | ID | LCDR3 | ID |
|---|---|---|---|---|---|---|
| 139109 | RASQSISSYLN | 1319 | AASSLQS | 1359 | QQSYSTPYT | 1399 |
| 139103 | RASQSISSSFLA | 1320 | GASRRAT | 1360 | QQYHSSPSWT | 1400 |
| 139105 | RSSQSLLHSNGYNYLD | 1321 | LGSNRAS | 1361 | MQALQTPYT | 1401 |
| 139111 | KSSQSLLRNDGKTPLY | 1322 | EVSNRFS | 1362 | MQNIQFPS | 1402 |
| 139100 | RSSQSLLHSNGYNYLN | 1323 | LGSKRAS | 1363 | MQALQTPYT | 1403 |
| 139101 | RASQSISSYLN | 1324 | GASTLAS | 1364 | QQSYKRAS | 1404 |
| 139102 | RSSQSLLYSNGYNYVD | 1325 | LGSNRAS | 1365 | MQGRQFPYS | 1405 |
| 139104 | RASQSVSSNLA | 1326 | GASTRAS | 1366 | QQYGSSLT | 1406 |
| 139106 | RASQSVSSKLA | 1327 | GASIRAT | 1367 | QQYGSSSWT | 1407 |
| 139107 | RASQSVGSTNLA | 1328 | DASNRAT | 1368 | QQYGSSPPWT | 1408 |
| 139108 | RASQSISSYLN | 1329 | AASSLQS | 1369 | QQSYTLA | 1409 |
| 139110 | KSSESLVHNSGKTYLN | 1330 | EVSNRDS | 1370 | MQGTHWPGT | 1410 |
| 139112 | QASEDINKFLN | 1331 | DASTLQT | 1371 | QQYESLPLT | 1411 |
| 139113 | RASQSVGSNLA | 1332 | GASTRAT | 1372 | QQYNDWLPVT | 1412 |
| 139114 | RASQSIGSSSLA | 1333 | GASSRAS | 1373 | QQYAGSPPFT | 1413 |
| 149362 | KASQDIDDAMN | 1334 | SATSPVP | 1374 | LQHDNFPLT | 1414 |
| 149363 | RASQDIYNNLA | 1335 | AANKSQS | 1375 | QHYYRFPYS | 1415 |
| 149364 | RSSQSLLHSNGYNYLD | 1336 | LGSNRAS | 1376 | MQALQTPYT | 1416 |
| 149365 | GGNNIGTKSVH | 1337 | DDSVRPS | 1377 | QVWDSDSEHVV | 1417 |
| 149366 | SGDGLSKKYVS | 1338 | RDKERPS | 1378 | QAWDDTTVV | 1418 |
| 149367 | RASQGIRNWLA | 1339 | AASNLQS | 1379 | QKYNSAPFT | 1419 |
| 149368 | GGNNIGSKSVH | 1340 | GKNNRPS | 1380 | SSRDSSGDHLRV | 1420 |
| 149369 | QGDSLGNYYAT | 1341 | GTNNRPS | 1381 | NSRDSSGHHLL | 1421 |
| BCMA_EBB- | RASQSVSSAYLA | 1342 | GASTRAT | 1382 | QHYGSSFNGSSLFT | 1422 |
| C1978-A4 | | | | | | |
| BCMA_EBB- | RASQSVSNSLA | 1343 | DASSRAT | 1383 | QQFGTSSGLT | 1423 |
| C1978-G1 | | | | | | |
| BCMA_EBB- | RASQSVSSSFLA | 1344 | GASSRAT | 1384 | QQYHSSPSWT | 1424 |
| C1979-C1 | | | | | | |
| BCMA_EBB- | RASQSVSTTFLA | 1345 | GSSNRAT | 1385 | QQYHSSPSWT | 1425 |
| C1978-C7 | | | | | | |
| BCMA_EBB- | RASQSISSYLN | 1346 | AASSLQS | 1386 | QQSYSTPYS | 1426 |
| C1978-D10 | | | | | | |
| BCMA_EBB- | RATQSIGSSFLA | 1347 | GASQRAT | 1387 | QHYESSPSWT | 1427 |
| C1979-C12 | | | | | | |
| BCMA_EBB- | RASQSVSSSYLA | 1348 | GASSRAT | 1388 | QQYGSPPRFT | 1428 |
| C1980-G4 | | | | | | |
| BCMA_EBB- | RASQSVSSSYLA | 1349 | GASSRAT | 1389 | QHYGSSPSWT | 1429 |
| C1980-D2 | | | | | | |
| BCMA_EBB- | RASQRVASNYLA | 1350 | GASSRAT | 1390 | QHYDSSPSWT | 1430 |
| C1978-A10 | | | | | | |
| BCMA_EBB- | RASQSLSSNFLA | 1351 | GASNWAT | 1391 | QYYGTSPMYT | 1431 |
| C1978-D4 | | | | | | |
| BCMA_EBB- | RSSQSLLHSNGYNYLD | 1352 | LGSNRAS | 1392 | MQALQTPLT | 1432 |
| C1980-A2 | | | | | | |
| BCMA_EBB- | RASQSVSSSYLA | 1353 | GTSSRAT | 1393 | QHYGNSPPKFT | 1433 |
| C1981-C3 | | | | | | |
| BCMA_EBB- | RASQSVASSFLA | 1354 | GASGRAT | 1394 | QHYGGSPRLT | 1434 |
| C1978-G4 | | | | | | |
| A7D12.2 | RASQDVNTAVS | 1355 | SASYRYT | 1395 | QQHYSTPWT | 1435 |
| C11D5.3 | RASESVSVIGAHLIH | 1356 | LASNLET | 1396 | LQSRIFPRT | 1436 |
| C12A3.2 | RASESVTILGSHLIY | 1357 | LASNVQT | 1397 | LQSRTIPRT | 1437 |
| C13F12.1 | RASESVTILGSHLIY | 1358 | LASNVQT | 1398 | LQSRTIPRT | 1438 |

TABLE 14
Heavy Chain Variable Domain CDRs according to
the Chothia numbering scheme (Al-Lazikani
et al., (1997) JMB 273,927-948)

| Candidate | HCDR1 | ID | HCDR2 | ID | HCDR3 | ID |
|---|---|---|---|---|---|---|
| 139109 | GFALSNH | 1439 | VYSGS | 1479 | HGGESDV | 1519 |
| 139103 | GFTFSNY | 1440 | SRSGEN | 1480 | SPAHYYGGMDV | 1520 |
| 139105 | GFTFDDY | 1441 | SWNSGS | 1481 | HSFLAY | 1521 |
| 139111 | GFALSNH | 1442 | VYSGS | 1482 | HGGESDV | 1522 |
| 139100 | GYIFDNF | 1443 | NPKNNN | 1483 | GPYYYQSYMDV | 1523 |
| 139101 | GFTFSSD | 1444 | SGSGGT | 1484 | LDSSGYYYARGPRY | 1524 |
| 139102 | GYTFSNY | 1445 | SAYNGN | 1485 | GPYYYYMDV | 1525 |
| 139104 | GFALSNH | 1446 | VYSGS | 1486 | HGGESDV | 1526 |
| 139106 | GFALSNH | 1447 | VYSGS | 1487 | HGGESDV | 1527 |
| 139107 | GFALSNH | 1448 | VYSGS | 1488 | HGGESDV | 1528 |
| 139108 | GFTFSDY | 1449 | SSSGST | 1489 | ESGDGMDV | 1529 |
| 139110 | GFTFSDY | 1450 | SSSGNT | 1490 | STMVREDY | 1530 |
| 139112 | GFALSNH | 1451 | VYSGS | 1491 | HGGESDV | 1531 |
| 139113 | GFALSNH | 1452 | VYSGS | 1492 | HGGESDV | 1532 |
| 139114 | GFALSNH | 1453 | VYSGS | 1493 | HGGESDV | 1533 |
| 149362 | GGSISSSYY | 1454 | YYSGS | 1494 | HWQEWPDAFDI | 1534 |
| 149363 | GFSLRTSGM | 1455 | DWDED | 1495 | SGAGGTSATAFDI | 1535 |
| 149364 | GFTFSSY | 1456 | SSSSSY | 1496 | TIAAVYAFDI | 1536 |
| 149365 | GFTFSDY | 1457 | SSSGST | 1497 | DLRGAFDI | 1537 |
| 149366 | GYTVTSH | 1458 | NPSGGV | 1498 | EGSGSGWYFDF | 1538 |
| 149367 | GGSISSGGY | 1459 | YYSGS | 1499 | AGIAARLRGAFDI | 1539 |
| 149368 | GGTFSSY | 1460 | IPIFGT | 1500 | RGGYQLLRWDVGLLRSAFDI | 1540 |
| 149369 | GDSVSSNSA | 1461 | YYRSKWY | 1501 | SSPEGLFLYWFDP | 1541 |
| BCMA_EBB- | GFTFSSY | 1462 | SGSGGS | 1502 | VEGSGSLDY | 1542 |
| C1978-A4 | | | | | | |
| BCMA_EBB- | GITFSRY | 1463 | SDSGVS | 1503 | RAGSEASDI | 1543 |
| C1978-G1 | | | | | | |
| BCMA_EBB- | GFTFSSY | 1464 | SGSGGS | 1504 | ATYKRELRYYYGMDV | 1544 |
| C1979-C1 | | | | | | |
| BCMA_EBB- | GFTFSSY | 1465 | SGSGGS | 1505 | ATYKRELRYYYGMDV | 1545 |
| C1978-C7 | | | | | | |
| BCMA_EBB- | GFTFDDY | 1466 | SWNSGS | 1506 | VGKAVPDV | 1546 |
| C1978-D10 | | | | | | |
| BCMA_EBB- | GFTFDDY | 1467 | NWKGNS | 1507 | HQGVAYYNYAMDV | 1547 |
| C1979-C12 | | | | | | |
| BCMA_EBB- | GFTFSSY | 1468 | SGSGGS | 1508 | VVRDGMDV | 1548 |
| C1980-G4 | | | | | | |
| BCMA_EBB- | GFTFSSY | 1469 | SGSGGS | 1509 | IPQTGTFDY | 1549 |
| C1980-D2 | | | | | | |
| BCMA_EBB- | GFTFSSY | 1470 | SGSGGS | 1510 | ANYKRELRYYYGMDV | 1550 |
| C1978-A10 | | | | | | |
| BCMA_EBB- | GFSFSSY | 1471 | SGSGGS | 1511 | ALVGATGAFDI | 1551 |
| C1978-D4 | | | | | | |
| BCMA_EBB- | GFTFSSY | 1472 | SGSGGS | 1512 | WFGEGFDP | 1552 |
| C1980-A2 | | | | | | |
| BCMA_EBB- | GFTFSSY | 1473 | SGSGGS | 1513 | VGYDSSGYYRDYYGMDV | 1553 |
| C1981-C3 | | | | | | |
| BCMA_EBB- | GFTFSSY | 1474 | SGSGGS | 1514 | MGWSSGYLGAFDI | 1554 |
| C1978-G4 | | | | | | |
| A7D12.2 | GYTFTNF | 1475 | NTYTGE | 1515 | GEIYYGYDGGFAY | 1555 |
| C11D5.3 | GYTFTDY | 1476 | NTETRE | 1516 | DYSYAMDY | 1556 |
| C12A3.2 | GYTFRHY | 1477 | NTESGV | 1517 | DYLYSLDF | 1557 |
| C13F12.1 | GYTFTHY | 1478 | NTETGE | 1518 | DYLYSCDY | 1558 |

TABLE 15
Light Chain Variable Domain CDRs according to
the Chothia numbering scheme
(Al-Lazikani et al., (1997) JMB 273,927-948)

| Candidate | LCDR1 | ID | LCDR2 | ID | LCDR3 | ID |
|---|---|---|---|---|---|---|
| 139109 | SQSISSY | 1559 | AAS | 1599 | SYSTPY | 1639 |
| 139103 | SQSISSSF | 1560 | GAS | 1600 | YHSSPSW | 1640 |
| 139105 | SQSLLHSNGYNY | 1561 | LGS | 1601 | ALQTPY | 1641 |
| 139111 | SQSLLRNDGKTP | 1562 | EVS | 1602 | NIQFP | 1642 |
| 139100 | SQSLLHSNGYNY | 1563 | LGS | 1603 | ALQTPY | 1643 |
| 139101 | SQSISSY | 1564 | GAS | 1604 | SYKRA | 1644 |
| 139102 | SQSLLYSNGYNY | 1565 | LGS | 1605 | GRQFPY | 1645 |
| 139104 | SQSVSSN | 1566 | GAS | 1606 | YGSSL | 1646 |
| 139106 | SQSVSSK | 1567 | GAS | 1607 | YGSSSW | 1647 |
| 139107 | SQSVGSTN | 1568 | DAS | 1608 | YGSSPPW | 1648 |
| 139108 | SQSISSY | 1569 | AAS | 1609 | SYTL | 1649 |
| 139110 | SESLVHNSGKTY | 1570 | EVS | 1610 | GTHWPG | 1650 |
| 139112 | SEDINKF | 1571 | DAS | 1611 | YESLPL | 1651 |
| 139113 | SQSVGSN | 1572 | GAS | 1612 | YNDWLPV | 1652 |
| 139114 | SQSIGSSS | 1573 | GAS | 1613 | YAGSPPF | 1653 |
| 149362 | SQDIDDA | 1574 | SAT | 1614 | HDNFPL | 1654 |
| 149363 | SQDIYNN | 1575 | AAN | 1615 | YYRFPY | 1655 |
| 149364 | SQSLLHSNGYNY | 1576 | LGS | 1616 | ALQTPY | 1656 |
| 149365 | NNIGTKS | 1577 | DDS | 1617 | WDSDSEHV | 1657 |
| 149366 | DGLSKKY | 1578 | RDK | 1618 | WDDTTV | 1658 |
| 149367 | SQGIRNW | 1579 | AAS | 1619 | YNSAPF | 1659 |
| 149368 | NNIGSKS | 1580 | GKN | 1620 | RDSSGDHLR | 1660 |
| 149369 | DSLGNYY | 1581 | GTN | 1621 | RDSSGHHL | 1661 |
| BCMA_EBB- | SQSVSSAY | 1582 | GAS | 1622 | YGSSFNGSSLF | 1662 |
| C1978-A4 | | | | | | |
| BCMA_EBB- | SQSVSNS | 1583 | DAS | 1623 | FGTSSGL | 1663 |
| C1978-G1 | | | | | | |
| BCMA_EBB- | SQSVSSSF | 1584 | GAS | 1624 | YHSSPSW | 1664 |
| C1979-C1 | | | | | | |
| BCMA_EBB- | SQSVSTTF | 1585 | GSS | 1625 | YHSSPSW | 1665 |
| C1978-C7 | | | | | | |
| BCMA_EBB- | SQSISSY | 1586 | AAS | 1626 | SYSTPY | 1666 |
| C1978-D10 | | | | | | |
| BCMA_EBB- | TQSIGSSF | 1587 | GAS | 1627 | YESSPSW | 1667 |
| C1979-C12 | | | | | | |
| BCMA_EBB- | SQSVSSSY | 1588 | GAS | 1628 | YGSPPRF | 1668 |
| C1980-G4 | | | | | | |
| BCMA_EBB- | SQSVSSSY | 1589 | GAS | 1629 | YGSSPSW | 1669 |
| C1980-D2 | | | | | | |
| BCMA_EBB- | SQRVASNY | 1590 | GAS | 1630 | YDSSPSW | 1670 |
| C1978-A10 | | | | | | |
| BCMA_EBB- | SQSLSSNF | 1591 | GAS | 1631 | YGTSPMY | 1671 |
| C1978-D4 | | | | | | |
| BCMA_EBB- | SQSLLHSNGYNY | 1592 | LGS | 1632 | ALQTPL | 1672 |
| C1980-A2 | | | | | | |
| BCMA_EBB- | SQSVSSSY | 1593 | GTS | 1633 | YGNSPPKF | 1673 |
| C1981-C3 | | | | | | |
| BCMA_EBB- | SQSVASSF | 1594 | GAS | 1634 | YGGSPRL | 1674 |
| C1978-G4 | | | | | | |
| A7D12.2 | SQDVNTA | 1595 | SAS | 1635 | HYSTPW | 1675 |
| C11D5.3 | SESVSVIGAHL | 1596 | LAS | 1636 | SRIFPR | 1676 |
| C12A3.2 | SESVTILGSHL | 1597 | LAS | 1637 | SRTIPR | 1677 |
| C13F12.1 | SESVTILGSHL | 1598 | LAS | 1638 | SRTIPR | 1678 |

TABLE 16
Heavy Chain Variable Domain CDRs according to a combination of
the Kabat numbering scheme (Kabat et al. (1991), “Sequences of
Proteins of Immunological Interest,” 5th Ed. Public Health Service,
National Institutes of Health, Bethesda, MD) and the Chothia
numbering scheme (Al-Lazikani et al., (1997) JMB 273,927-948).

| Candidate | HCDR1 | ID | HCDR2 | ID | HCDR3 | ID |
|---|---|---|---|---|---|---|
| 139109 | GFALSNHGMS | 1679 | GIVYSGSTYYAASVKG | 1719 | HGGESDV | 1759 |
| 139103 | GFTFSNYAMS | 1680 | GISRSGENTYYADSVKG | 1720 | SPAHYYGGMDV | 1760 |
| 139105 | GFTFDDYAMH | 1681 | GISWNSGSIGYADSV | 1721 | HSFLAY | 1761 |
| | | | KG | | | |
| 139111 | GFALSNHGMS | 1682 | GIVYSGSTYYAASVKG | 1722 | HGGESDV | 1762 |
| 139100 | GYIFDNFGIN | 1683 | WINPKNNNTNYAQK | 1723 | GPYYYQSYMDV | 1763 |
| | | | FQG | | | |
| 139101 | GFTFSSDAMT | 1684 | VISGSGGTTYYADSVKG | 1724 | LDSSGYYYARGPRY | 1764 |
| 139102 | GYTFSNYGIT | 1685 | WISAYNGNTNYAQKF | 1725 | GPYYYYMDV | 1765 |
| | | | QG | | | |
| 139104 | GFALSNHGMS | 1686 | GIVYSGSTYYAASVKG | 1726 | HGGESDV | 1766 |
| 139106 | GFALSNHGMS | 1687 | GIVYSGSTYYAASVKG | 1727 | HGGESDV | 1767 |
| 139107 | GFALSNHGMS | 1688 | GIVYSGSTYYAASVKG | 1728 | HGGESDV | 1768 |
| 139108 | GFTFSDYYMS | 1689 | YISSSGSTIYYADSVKG | 1729 | ESGDGMDV | 1769 |
| 139110 | GFTFSDYYMS | 1690 | YISSSGNTIYYADSVKG | 1730 | STMVREDY | 1770 |
| 139112 | GFALSNHGMS | 1691 | GIVYSGSTYYAASVKG | 1731 | HGGESDV | 1771 |
| 139113 | GFALSNHGMS | 1692 | GIVYSGSTYYAASVKG | 1732 | HGGESDV | 1772 |
| 139114 | GFALSNHGMS | 1693 | GIVYSGSTYYAASVKG | 1733 | HGGESDV | 1773 |
| 149362 | GGSISSSYYYWG | 1694 | SIYYSGSAYYNPSLKS | 1734 | HWQEWPDAFDI | 1774 |
| 149363 | GFSLRTSGMCVS | 1695 | RIDWDEDKFYSTSLKT | 1735 | SGAGGTSATAFDI | 1775 |
| 149364 | GFTFSSYSMN | 1696 | SISSSSSYIYYADSVKG | 1736 | TIAAVYAFDI | 1776 |
| 149365 | GFTFSDYYMS | 1697 | YISSSGSTIYYADSVKG | 1737 | DLRGAFDI | 1777 |
| 149366 | GYTVTSHYIH | 1698 | MINPSGGVTAYSQTL | 1738 | EGSGSGWYFDF | 1778 |
| | | | QG | | | |
| 149367 | GGSISSGGYYWS | 1699 | YIYYSGSTYYNPSLKS | 1739 | AGIAARLRGAFDI | 1779 |
| 149368 | GGTFSSYAIS | 1700 | GIIPIFGTANYAQKFQG | 1740 | RGGYQLLRWDVGLLR | 1780 |
| | | | | | SAFDI | |
| 149369 | GDSVSSNSAAWN | 1701 | RTYYRSKWYSFYAISL | 1741 | SSPEGLFLYWFDP | 1781 |
| | | | KS | | | |
| BCMA_EBB- | GFTFSSYAMS | 1702 | AISGSGGSTYYADSVKG | 1742 | VEGSGSLDY | 1782 |
| C1978-A4 | | | | | | |
| BCMA_EBB- | GITFSRYPMS | 1703 | GISDSGVSTYYADSAKG | 1743 | RAGSEASDI | 1783 |
| C1978-G1 | | | | | | |
| BCMA_EBB- | GFTFSSYAMS | 1704 | AISGSGGSTYYADSVKG | 1744 | ATYKRELRYYYGMDV | 1784 |
| C1979-C1 | | | | | | |
| BCMA_EBB- | GFTFSSYAMS | 1705 | AISGSGGSTYYADSVKG | 1745 | ATYKRELRYYYGMDV | 1785 |
| C1978-C7 | | | | | | |
| BCMA_EBB- | GFTFDDYAMH | 1706 | GISWNSGSIGYADSV | 1746 | VGKAVPDV | 1786 |
| C1978-D10 | | | KG | | | |
| BCMA_EBB- | GFTFDDYAMH | 1707 | SINWKGNSLAYGDSV | 1747 | HQGVAYYNYAMDV | 1787 |
| C1979-C12 | | | KG | | | |
| BCMA_EBB- | GFTFSSYAMS | 1708 | AISGSGGSTYYADSVKG | 1748 | VVRDGMDV | 1788 |
| C1980-G4 | | | | | | |
| BCMA_EBB- | GFTFSSYAMS | 1709 | AISGSGGSTYYADSVKG | 1749 | IPQTGTFDY | 1789 |
| C1980-D2 | | | | | | |
| BCMA_EBB- | GFTFSSYAMS | 1710 | AISGSGGSTYYADSVKG | 1750 | ANYKRELRYYYGMDV | 1790 |
| C1978-A10 | | | | | | |
| BCMA_EBB- | GFSFSSYAMS | 1711 | AISGSGGSTYYADSVKG | 1751 | ALVGATGAFDI | 1791 |
| C1978-D4 | | | | | | |
| BCMA_EBB- | GFTFSSYAMS | 1712 | AISGSGGSTYYADSVKG | 1752 | WFGEGFDP | 1792 |
| C1980-A2 | | | | | | |
| BCMA_EBB- | GFTFSSYAMS | 1713 | AISGSGGSTYYADSVKG | 1753 | VGYDSSGYYRDYYGM | 1793 |
| C1981-C3 | | | | | DV | |
| BCMA_EBB- | GFTFSSYAMS | 1714 | AISGSGGSTYYADSVKG | 1754 | MGWSSGYLGAFDI | 1794 |
| C1978-G4 | | | | | | |
| A7D12.2 | GYTFTNFGMN | 1715 | WINTYTGESYFADDF | 1755 | GEIYYGYDGGFAY | 1795 |
| | | | KG | | | |
| C11D5.3 | GYTFTDYSIN | 1716 | WINTETREPAYAYDF | 1756 | DYSYAMDY | 1796 |
| | | | RG | | | |
| C12A3.2 | GYTFRHYSMN | 1717 | RINTESGVPIYADDFKG | 1757 | DYLYSLDF | 1797 |
| C13F12.1 | GYTFTHYSMN | 1718 | RINTETGEPLYADDFKG | 1758 | DYLYSCDY | 1798 |

TABLE 17
Light Chain Variable Domain CDRs according to a combination
of the Kabat numbering scheme (Kabat et al. (1991),
“Sequences of Proteins of Immunological Interest,” 5th
Ed. Public Health Service, National Institutes of Health,
Bethesda, MD) and the Chothia numbering scheme
(Al-Lazikani et al., (1997) JMB 273,927-948).

| Candidate | LCDR1 | ID | LCDR2 | ID | LCDR3 | ID |
|---|---|---|---|---|---|---|
| 139109 | RASQSISSYLN | 1799 | AASSLQS | 1839 | QQSYSTPYT | 1879 |
| 139103 | RASQSISSSFLA | 1800 | GASRRAT | 1840 | QQYHSSPSWT | 1880 |
| 139105 | RSSQSLLHSNGYNYLD | 1801 | LGSNRAS | 1841 | MQALQTPYT | 1881 |
| 139111 | KSSQSLLRNDGKTPLY | 1802 | EVSNRFS | 1842 | MQNIQFPS | 1882 |
| 139100 | RSSQSLLHSNGYNYLN | 1803 | LGSKRAS | 1843 | MQALQTPYT | 1883 |
| 139101 | RASQSISSYLN | 1804 | GASTLAS | 1844 | QQSYKRAS | 1884 |
| 139102 | RSSQSLLYSNGYNYVD | 1805 | LGSNRAS | 1845 | MQGRQFPYS | 1885 |
| 139104 | RASQSVSSNLA | 1806 | GASTRAS | 1846 | QQYGSSLT | 1886 |
| 139106 | RASQSVSSKLA | 1807 | GASIRAT | 1847 | QQYGSSSWT | 1887 |
| 139107 | RASQSVGSTNLA | 1808 | DASNRAT | 1848 | QQYGSSPPWT | 1888 |
| 139108 | RASQSISSYLN | 1809 | AASSLQS | 1849 | QQSYTLA | 1889 |
| 139110 | KSSESLVHNSGKTYLN | 1810 | EVSNRDS | 1850 | MQGTHWPGT | 1890 |
| 139112 | QASEDINKFLN | 1811 | DASTLQT | 1851 | QQYESLPLT | 1891 |
| 139113 | RASQSVGSNLA | 1812 | GASTRAT | 1852 | QQYNDWLPVT | 1892 |
| 139114 | RASQSIGSSSLA | 1813 | GASSRAS | 1853 | QQYAGSPPFT | 1893 |
| 149362 | KASQDIDDAMN | 1814 | SATSPVP | 1854 | LQHDNFPLT | 1894 |
| 149363 | RASQDIYNNLA | 1815 | AANKSQS | 1855 | QHYYRFPYS | 1895 |
| 149364 | RSSQSLLHSNGYNYLD | 1816 | LGSNRAS | 1856 | MQALQTPYT | 1896 |
| 149365 | GGNNIGTKSVH | 1817 | DDSVRPS | 1857 | QVWDSDSEHVV | 1897 |
| 149366 | SGDGLSKKYVS | 1818 | RDKERPS | 1858 | QAWDDTTVV | 1898 |
| 149367 | RASQGIRNWLA | 1819 | AASNLQS | 1859 | QKYNSAPFT | 1899 |
| 149368 | GGNNIGSKSVH | 1820 | GKNNRPS | 1860 | SSRDSSGDHLRV | 1900 |
| 149369 | QGDSLGNYYAT | 1821 | GTNNRPS | 1861 | NSRDSSGHHLL | 1901 |
| BCMA_EBB- | RASQSVSSAYLA | 1822 | GASTRAT | 1862 | QHYGSSFNGSSLFT | 1902 |
| C1978-A4 | | | | | | |
| BCMA_EBB- | RASQSVSNSLA | 1823 | DASSRAT | 1863 | QQFGTSSGLT | 1903 |
| C1978-G1 | | | | | | |
| BCMA_EBB- | RASQSVSSSFLA | 1824 | GASSRAT | 1864 | QQYHSSPSWT | 1904 |
| C1979-C1 | | | | | | |
| BCMA_EBB- | RASQSVSTTFLA | 1825 | GSSNRAT | 1865 | QQYHSSPSWT | 1905 |
| C1978-C7 | | | | | | |
| BCMA_EBB- | RASQSISSYLN | 1826 | AASSLQS | 1866 | QQSYSTPYS | 1906 |
| C1978-D10 | | | | | | |
| BCMA_EBB- | RATQSIGSSFLA | 1827 | GASQRAT | 1867 | QHYESSPSWT | 1907 |
| C1979-C12 | | | | | | |
| BCMA_EBB- | RASQSVSSSYLA | 1828 | GASSRAT | 1868 | QQYGSPPRFT | 1908 |
| C1980-G4 | | | | | | |
| BCMA_EBB- | RASQSVSSSYLA | 1829 | GASSRAT | 1869 | QHYGSSPSWT | 1909 |
| C1980-D2 | | | | | | |
| BCMA_EBB- | RASQRVASNYLA | 1830 | GASSRAT | 1870 | QHYDSSPSWT | 1910 |
| C1978-A10 | | | | | | |
| BCMA_EBB- | RASQSLSSNFLA | 1831 | GASNWAT | 1871 | QYYGTSPMYT | 1911 |
| C1978-D4 | | | | | | |
| BCMA_EBB- | RSSQSLLHSNGYNYLD | 1832 | LGSNRAS | 1872 | MQALQTPLT | 1912 |
| C1980-A2 | | | | | | |
| BCMA_EBB- | RASQSVSSSYLA | 1833 | GTSSRAT | 1873 | QHYGNSPPKFT | 1913 |
| C1981-C3 | | | | | | |
| BCMA_EBB- | RASQSVASSFLA | 1834 | GASGRAT | 1874 | QHYGGSPRLT | 1914 |
| C1978-G4 | | | | | | |
| A7D12.2 | RASQDVNTAVS | 1835 | SASYRYT | 1875 | QQHYSTPWT | 1915 |
| C11D5.3 | RASESVSVIGAHLIH | 1836 | LASNLET | 1876 | LQSRIFPRT | 1916 |
| C12A3.2 | RASESVTILGSHLIY | 1837 | LASNVQT | 1877 | LQSRTIPRT | 1917 |
| C13F12.1 | RASESVTILGSHLIY | 1838 | LASNVQT | 1878 | LQSRTIPRT | 1918 |

[0920] In certain embodiments, the CAR molecule described herein (e.g., the CAR nucleic acid or the CAR polypeptide) or a BCMA binding domain includes:

(1) one, two, or three light chain (LC) CDRs chosen from one of the following:

[0921] (i) a LC CDR1 of SEQ ID NO: 1320, LC CDR2 of SEQ ID NO: 1360 and LC CDR3 of SEQ ID NO: 1400 of BCMA-4 CAR (139103);

[0922] (ii) a LC CDR1 of SEQ ID NO: 1319, LC CDR2 of SEQ ID NO: 1359 and LC CDR3 of SEQ ID NO: 1399 of BCMA-10 CAR (139109);

[0923] (iii) a LC CDR1 of SEQ ID NO: 1331, LC CDR2 of SEQ ID NO: 1371 and LC CDR3 of SEQ ID NO: 1411 of BCMA-13 CAR (139112); or

[0924] (iv) a LC CDR1 of SEQ ID NO: 1333, LC CDR2 of SEQ ID NO: 1373 and LC CDR3 of SEQ ID NO: 1413 of BCMA-15 CAR (139114), and/or

(2) one, two, or three heavy chain (HC) CDRs from one of the following:

[0925] (i) a HC CDR1 of SEQ ID NO: 1200, HC CDR2 of SEQ ID NO: 1240 and HC CDR3 of SEQ ID NO: 1280 of BCMA-4 CAR (139103);

[0926] (ii) a HC CDR1 of SEQ ID NO: 1199, HC CDR2 of SEQ ID NO: 1239 and HC CDR3 of SEQ ID NO: 1279 of BCMA-10 CAR (139109);

[0927] (iii) a HC CDR1 of SEQ ID NO: 1121, HC CDR2 of SEQ ID NO: 1251 and HC CDR3 of SEQ ID NO: 1291 of BCMA-13 CAR (139112); or

[0928] (iv) a HC CDR1 of SEQ ID NO: 1213, HC CDR2 of SEQ ID NO: 1253 and HC CDR3 of SEQ ID NO: 1293 of BCMA-15 (139114).

[0929] In certain embodiments, the CAR molecule described herein (e.g., the CAR nucleic acid or the CAR polypeptide) includes:

[0930] (1) one, two, or three light chain (LC) CDRs chosen from one of the following:

[0931] (i) a LC CDR1 of SEQ ID NO: 1560, LC CDR2 of SEQ ID NO: 1600 and LC CDR3 of SEQ ID NO: 1640 of BCMA-4 CAR (139103);

[0932] (ii) a LC CDR1 of SEQ ID NO: 1559, LC CDR2 of SEQ ID NO: 1599 and LC CDR3 of SEQ ID NO: 1639 of BCMA-10 CAR (139109);

[0933] (iii) a LC CDR1 of SEQ ID NO: 1571, LC CDR2 of SEQ ID NO: 1611 and LC CDR3 of SEQ ID NO: 1651 of BCMA-13 CAR (139112); or

[0934] (iv) a LC CDR1 of SEQ ID NO: 1573, LC CDR2 of SEQ ID NO: 1613 and LC CDR3 of SEQ ID NO: 1653 of BCMA-15 CAR (139114); and/or

[0935] (2) one, two, or three heavy chain (HC) CDRs chosen from one of the following:

[0936] (i) a HC CDR1 of SEQ ID NO: 1440, HC CDR2 of SEQ ID NO: 1480 and HC CDR3 of SEQ ID NO: 1520 of BCMA-4 CAR (139103);

[0937] (ii) a HC CDR1 of SEQ ID NO: 1439, HC CDR2 of SEQ ID NO: 1479 and HC CDR3 of SEQ ID NO: 1519 of BCMA-10 CAR (139109);

[0938] (iii) a HC CDR1 of SEQ ID NO: 1451, HC CDR2 of SEQ ID NO: 1491 and HC CDR3 of SEQ ID NO: 1531 of BCMA-13 CAR (139112); or

[0939] (iv) a HC CDR1 of SEQ ID NO: 1453, HC CDR2 of SEQ ID NO: 1493 and HC CDR3 of SEQ ID NO: 1533 of BCMA-15 CAR (139114).

[0940] In certain embodiments, the CAR molecule described herein (e.g., the CAR nucleic acid or the CAR polypeptide) includes:

(1) one, two, or three light chain (LC) CDRs chosen from one of the following:

[0941] (i) a LC CDR1 of SEQ ID NO: 1800 LC CDR2 of SEQ ID NO: 1840 and LC CDR3 of SEQ ID NO: 1880 of BCMA-4 CAR (139103);

[0942] (ii) a LC CDR1 of SEQ ID NO: 1799, LC CDR2 of SEQ ID NO: 1839 and LC CDR3 of SEQ ID NO: 1879 of BCMA-10 CAR (139109);

[0943] (iii) a LC CDR1 of SEQ ID NO: 1811, LC CDR2 of SEQ ID NO: 1851 and LC CDR3 of SEQ ID NO: 1891 of BCMA-13 CAR (139112); or

[0944] (iv) a LC CDR1 of SEQ ID NO: 1813, LC CDR2 of SEQ ID NO: 1853 and LC CDR3 of SEQ ID NO: 1893 of BCMA-15 CAR (139114); and/or

(2) one, two, or three heavy chain (HC) CDRs chosen from one of the following:

[0945] (i) a HC CDR1 of SEQ ID NO: 1680, HC CDR2 of SEQ ID NO: 1720 and HC CDR3 of SEQ ID NO: 1760 of BCMA-4 CAR (139103);

[0946] (ii) a HC CDR1 of SEQ ID NO: 1679, HC CDR2 of SEQ ID NO: 1719 and HC CDR3 of SEQ ID NO: 1759 of BCMA-10 CAR (139109);

[0947] (iii) a HC CDR1 of SEQ ID NO: 1691, HC CDR2 of SEQ ID NO: 1731 and HC CDR3 of SEQ ID NO: 1771 of BCMA-13 CAR (139112);

[0948] (iv) a HC CDR1 of SEQ ID NO: 1693, HC CDR2 of SEQ ID NO: 1733 and HC CDR3 of SEQ ID NO: 1773 of BCMA-15 CAR (139114).

[0949] Exemplary Components of the CAR Molecules:

Leader (amino acid sequence)

(SEQ ID NO: 1919)

MALPVTALLLPLALLLHAARP
leader (nucleic acid sequence)

(SEQ ID NO: 1920)

ATGGCCCTGCCTGTGACAGCCCTGCTGCTGCCTCTGGCTCTGCTGCTGC
ATGCCGCTAGACCC
CD8 hinge (amino acid sequence)

(SEQ ID NO: 1921)

TTTPAPRPPTPAPTIASQPLSLRPEACRPAAGGAVHTRGLDFACD
CD8 hinge (nucleic acid sequence)

(SEQ ID NO: 1922)

ACCACGACGCCAGCGCCGCGACCACCAACACCGGCGCCCACCATCGCGT
CGCAGCCCCTGTCCCTGCGCCCAGAGGCGTGCCGGCCAGCGGCGGGGGG
CGCAGTGCACACGAGGGGGCTGGACTTCGCCTGTGAT
CD8 transmembrane (amino acid sequence)

(SEQ ID NO: 1923)

IYIWAPLAGTCGVLLLSLVITLYC
CD8 transmembrane (nucleic acid sequence)

(SEQ ID NO: 1924)

ATCTACATCTGGGCGCCCTTGGCCGGGACTTGTGGGGTCCTTCTCCTGT
CACTGGTTATCACCCTTTACTGC
4-1BB Intracellular domain (amino acid sequence)

(SEQ ID NO: 1925)

KRGRKKLLYIFKQPFMRPVQTTQEEDGCSCRFPEEEEGGCEL
4-1BB Intracellular domain (nucleic acid sequence)

(SEQ ID NO: 1926)

AAACGGGGCAGAAAGAAACTCCTGTATATATTCAAACAACCATTTATGA
GACCAGTACAAACTACTCAAGAGGAAGATGGCTGTAGCTGCCGATTTCC
AGAAGAAGAAGAAGGAGGATGTGAACTG
CD28 Intracellular domain (amino acid sequence)
(SEQ ID NO: 1927)

(SEQ ID NO: 1927)

RSKRSRLLHSDYMNMTPRRPGPTRKHYQPYAPPRDFAAYRS
CD28 Intracellular domain (nucleotide sequence)
(SEQ ID NO: 1928)

(SEQ ID NO: 1928)

AGGAGTAAGAGGAGCAGGCTCCTGCACAGTGACTACATGAACATGACTC
CCCGCCGCCCCGGGCCCACCCGCAAGCATTACCAGCCCTATGCCCCACC
ACGCGACTTCGCAGCCTATCGCTCC
ICOS Intracellular domain (amino acid sequence)
(SEQ ID NO: 1929)

(SEQ ID NO: 1929)

T K K K Y S S S V H D P N G E Y M F M R A V N T A
K K S R L T D V T L
ICOS Intracellular domain (nucleotide sequence)
(SEQ ID NO: 1930)

(SEQ ID NO: 1930)

ACAAAAAAGAAGTATTCATCCAGTGTGCACGACCCTAACGGTGAATACA
TGTTCATGAGAGCAGTGAACACAGCCAAAAAATCCAGACTCACAGATGT
GACCCTA
CD3 zeta domain (amino acid sequence)

(SEQ ID NO: 1931)

RVKFSRSADAPAYKQGQNQLYNELNLGRREEYDVLDKRRGRDPEMGGKP
RRKNPQEGLYNELQKDKMAEAYSEIGMKGERRRGKGHDGLYQGLSTATK
DTYDALHMQALPPR
CD3 zeta (nucleic acid sequence)

(SEQ ID NO: 1932)

AGAGTGAAGTTCAGCAGGAGCGCAGACGCCCCCGCGTACAAGCAGGGCC
AGAACCAGCTCTATAACGAGCTCAATCTAGGACGAAGAGAGGAGTACGA
TGTTTTGGACAAGAGACGTGGCCGGGACCCTGAGATGGGGGGAAAGCCG
AGAAGGAAGAACCCTCAGGAAGGCCTGTACAATGAACTGCAGAAAGATA
AGATGGCGGAGGCCTACAGTGAGATTGGGATGAAAGGCGAGCGCCGGAG
GGGCAAGGGGCACGATGGCCTTTACCAGGGTCTCAGTACAGCCACCAAG
GACACCTACGACGCCCTTCACATGCAGGCCCTGCCCCCTCGC
CD3 zeta domain (amino acid sequence; NCBI
Reference NM_000734.3)

(SEQ ID NO: 1933)

RVKFSRSADAPAYQQGQNQLYNELNLGRREEYDVLDKRRGRDPEMGGKP
RRKNPQEGLYNELQKDKMAEAYSEIGMKGERRRGKGHDGLYQGLSTATK
DTYDALHMQALPPR
CD3 zeta (nucleic acid sequence; NCBI Reference
Sequence NM_000734.3);

(SEQ ID NO: 1934)

AGAGTGAAGTTCAGCAGGAGCGCAGACGCCCCCGCGTACCAGCAGGGCC
AGAACCAGCTCTATAACGAGCTCAATCTAGGACGAAGAGAGGAGTACGA
TGTTTTGGACAAGAGACGTGGCCGGGACCCTGAGATGGGGGGAAAGCCG
AGAAGGAAGAACCCTCAGGAAGGCCTGTACAATGAACTGCAGAAAGATA
AGATGGCGGAGGCCTACAGTGAGATTGGGATGAAAGGCGAGCGCCGGAG
GGGCAAGGGGCACGATGGCCTTTACCAGGGTCTCAGTACAGCCACCAAG
GACACCTACGACGCCCTTCACATGCAGGCCCTGCCCCCTCGC
IgG4 Hinge (amino acid sequence)

(SEQ ID NO: 1935)

ESKYGPPCPPCPAPEFLGGPSVFLFPPKPKDTLMISRTPEVTCVVVDVS
QEDPEVQFNWYVDGVEVHNAKTKPREEQFNSTYRVVSVLTVLHQDWLNG
KEYKCKVSNKGLPSSIEKTISKAKGQPREPQVYTLPPSQEEMTKNQVSL
TCLVKGFYPSDIAVEWESNGQPENNYKTTPPVLDSDGSFFLYSRLTVDK
SRWQEGNVFSCSVMHEALHNHYTQKSLSLSLGKM
IgG4 Hinge (nucleotide sequence)

(SEQ ID NO: 1936)

GAGAGCAAGTACGGCCCTCCCTGCCCCCCTTGCCCTGCCCCCGAGTTCC
TGGGCGGACCCAGCGTGTTCCTGTTCCCCCCCAAGCCCAAGGACACCCT
GATGATCAGCCGGACCCCCGAGGTGACCTGTGTGGTGGTGGACGTGTCC
CAGGAGGACCCCGAGGTCCAGTTCAACTGGTACGTGGACGGCGTGGAGG
TGCACAACGCCAAGACCAAGCCCCGGGAGGAGCAGTTCAATAGCACCTA
CCGGGTGGTGTCCGTGCTGACCGTGCTGCACCAGGACTGGCTGAACGGC
AAGGAATACAAGTGTAAGGTGTCCAACAAGGGCCTGCCCAGCAGCATCG
AGAAAACCATCAGCAAGGCCAAGGGCCAGCCTCGGGAGCCCCAGGTGTA
CACCCTGCCCCCTAGCCAAGAGGAGATGACCAAGAACCAGGTGTCCCTG
ACCTGCCTGGTGAAGGGCTTCTACCCCAGCGACATCGCCGTGGAGTGGG
AGAGCAACGGCCAGCCCGAGAACAACTACAAGACCACCCCCCCTGTGCT
GGACAGCGACGGCAGCTTCTTCCTGTACAGCCGGCTGACCGTGGACAAG
AGCCGGTGGCAGGAGGGCAACGTCTTTAGCTGCTCCGTGATGCACGAGG
CCCTGCACAACCACTACACCCAGAAGAGCCTGAGCCTGTCCCTGGGCAA
GATG

[0950] In an embodiment, the CAR molecule comprises a mesothelin CAR described herein, e.g., a mesothelin CAR described in WO 2015/090230, incorporated herein by reference. In embodiments, the mesothelin CAR comprises an amino acid, or has a nucleotide sequence shown in WO 2015/090230 incorporated herein by reference, or a sequence substantially identical to any of the aforesaid sequences (e.g., at least 85%, 90%, 95% or more identical to any of the aforesaid mesothelin CAR sequences). In one embodiment, the CAR molecule comprises a mesothelin CAR, or an antigen binding domain according to Tables 2-3 of WO 2015/090230, incorporated herein by reference, or a sequence substantially identical thereto (e.g., at least 85%, 90%, 95% or more identical thereto). The amino acid and nucleotide sequences encoding the mesothelin CAR molecules and antigen binding domains (e.g., including one, two, three VH CDRs; and one, two, three VL CDRs according to Kabat or Chothia), are specified in WO 2015/090230.

[0951] In an embodiment, the CAR molecule comprises a CLL1 CAR described herein, e.g., a CLL1 CAR described in US2016/0051651A1, incorporated herein by reference. In embodiments, the CLL1 CAR comprises an amino acid, or has a nucleotide sequence shown in US2016/0051651A1, incorporated herein by reference, or a sequence substantially identical to any of the aforesaid sequences (e.g., at least 85%, 90%, 95% or more identical to any of the aforesaid CLL1 CAR sequences).

[0952] In other embodiments, the CLL1 CAR includes a CAR molecule, or an antigen binding domain according to Table 2 of WO2016/014535, incorporated herein by reference, or a sequence substantially identical to any of the aforesaid sequences (e.g., at least 85%, 90%, 95% or more identical to any of the aforesaid CLL1 CAR sequences). The amino acid and nucleotide sequences encoding the CLL-1 CAR molecules and antigen binding domains (e.g., including one, two, three VH CDRs; and one, two, three VL CDRs according to Kabat or Chothia), are specified in WO2016/014535.

[0953] In an embodiment, the CAR molecule comprises a CD33 CAR described herein, e.g., a CD33 CAR described in US2016/0096892A1, incorporated herein by reference. In embodiments, the CD33 CAR comprises an amino acid, or has a nucleotide sequence shown in US2016/0096892A1, incorporated herein by reference, or a sequence substantially identical to any of the aforesaid sequences (e.g., at least 85%, 90%, 95% or more identical to any of the aforesaid CD33 CAR sequences). In other embodiments, the CD33 CAR CAR or antigen binding domain thereof can include a CAR molecule (e.g., any of CAR33-1 to CAR-33-9), or an antigen binding domain according to Table 2 or 9 of WO2016/014576, incorporated herein by reference, or a sequence substantially identical to any of the aforesaid sequences (e.g., at least 85%, 90%, 95% or more identical to any of the aforesaid CD33 CAR sequences). The amino acid and nucleotide sequences encoding the CD33 CAR molecules and antigen binding domains (e.g., including one, two, three VH CDRs; and one, two, three VL CDRs according to Kabat or Chothia), are specified in WO2016/014576.

[0954] In embodiments, the CAR molecule comprises a CD123 CAR described herein, e.g., a CD123 CAR described in US2014/0322212A1 or US2016/0068601A1, both incorporated herein by reference. In embodiments, the CD123 CAR comprises an amino acid, or has a nucleotide sequence shown in US2014/0322212A1 or US2016/0068601A1, both incorporated herein by reference, or a sequence substantially identical to any of the aforesaid sequences (e.g., at least 85%, 90%, 95% or more identical to any of the aforesaid CD123 CAR sequences). In one embodiment, the CAR molecule comprises a CD123 CAR (e.g., any of the CAR1-CAR8), or an antigen binding domain according to Tables 1-2 of WO 2014/130635, incorporated herein by reference, or a sequence substantially identical thereto (e.g., at least 85%, 90%, 95% or more identical to any of the aforesaid CD123 CAR sequences). The amino acid and nucleotide sequences encoding the CD123 CAR molecules and antigen binding domains (e.g., including one, two, three VH CDRs; and one, two, three VL CDRs according to Kabat or Chothia), are specified in WO 2014/130635.

[0955] In other embodiments, the CAR molecule comprises a CD123 CAR comprises a CAR molecule (e.g., any of the CAR123-1 to CAR123-4 and hzCAR123-1 to hzCAR123-32), or an antigen binding domain according to Tables 2, 6, and 9 of WO2016/028896, incorporated herein by reference, or a sequence substantially identical thereto (e.g., at least 85%, 90%, 95% or more identical to any of the aforesaid CD123 CAR sequences). The amino acid and nucleotide sequences encoding the CD123 CAR molecules and antigen binding domains (e.g., including one, two, three VH CDRs; and one, two, three VL CDRs according to Kabat or Chothia), are specified in WO2016/028896.

[0956] In an embodiment, the CAR molecule comprises an EGFRvIII CAR molecule described herein, e.g., an EGFRvIII CAR described US2014/0322275A1, incorporated herein by reference. In embodiments, the EGFRvIII CAR comprises an amino acid, or has a nucleotide sequence shown in US2014/0322275A1, incorporated herein by reference, or a sequence substantially identical to any of the aforesaid sequences (e.g., at least 85%, 90%, 95% or more identical to any of the aforesaid EGFRvIII CAR sequences). In one embodiment, the CAR molecule comprises an EGFRvIII CAR, or an antigen binding domain according to Table 2 or SEQ ID NO:11 of WO 2014/130657, incorporated herein by reference, or a sequence substantially identical thereto (e.g., at least 85%, 90%, 95% or more identical thereto). The amino acid and nucleotide sequences encoding the EGFRvIII CAR molecules and antigen binding domains (e.g., including one, two, three VH CDRs; and one, two, three VL CDRs according to Kabat or Chothia), are specified in WO 2014/130657.

[0957] In other embodiments, the CAR molecule comprises an a GFR ALPHA-4 CAR, e.g., can include a CAR molecule, or an antigen binding domain according to Table 2 of WO2016/025880, incorporated herein by reference, or a sequence substantially identical to any of the aforesaid sequences (e.g., at least 85%, 90%, 95% or more identical to any of the aforesaid GFR ALPHA-4 sequences). The amino acid and nucleotide sequences encoding the GFR ALPHA-4 CAR molecules and antigen binding domains (e.g., including one, two, three VH CDRs; and one, two, three VL CDRs according to Kabat or Chothia), are specified in WO2016/025880.

### Inhibitory Domains

[0958] In an embodiment, the vector comprises a nucleic acid sequence that encodes a CAR, e.g., a CAR described herein, and a nucleic acid sequence that encodes an inhibitory molecule comprising: an inhKIR cytoplasmic domain; a transmembrane domain, e.g., a KIR transmembrane domain; and an inhibitor cytoplasmic domain, e.g., an ITIM domain, e.g., an inhKIR ITIM domain. In an embodiment the inhibitory molecule is a naturally occurring inhKIR, or a sequence sharing at least 50, 60, 70, 80, 85, 90, 95, or 99% homology with, or that differs by no more than 1, 2, 3, 4, 5, 6, 7, 8, 9, 10, 15, or 20 residues from, a naturally occurring inhKIR.

[0959] In an embodiment, the nucleic acid sequence that encodes an inhibitory molecule comprises: a SLAM family cytoplasmic domain; a transmembrane domain, e.g., a SLAM family transmembrane domain; and an inhibitor cytoplasmic domain, e.g., a SLAM family domain, e.g., an SLAM family ITIM domain. In an embodiment the inhibitory molecule is a naturally occurring SLAM family member, or a sequence sharing at least 50, 60, 70, 80, 85, 90, 95, or 99% homology with, or that differs by no more than 1, 2, 3, 4, 5, 6, 7, 8, 9, 10, 15, or 20 residues from, a naturally occurring SLAM family member.

[0960] In one embodiment, the vector is an in vitro transcribed vector, e.g., a vector that transcribes RNA of a nucleic acid molecule described herein. In one embodiment, the nucleic acid sequence in the vector further comprises a poly(A) tail, e.g., a poly A tail. In one embodiment, the nucleic acid sequence in the vector further comprises a 3′UTR, e.g., a 3′ UTR described herein, e.g., comprising at least one repeat of a 3′UTR derived from human beta-globulin. In one embodiment, the nucleic acid sequence in the vector further comprises promoter, e.g., a T2A promoter.

### Promoters

[0961] In one embodiment, the vector further comprises a promoter. In some embodiments, the promoter is chosen from an EF-1 promoter, a CMV IE gene promoter, an EF-1α promoter, an ubiquitin C promoter, or a phosphoglycerate kinase (PGK) promoter. In one embodiment, the promoter is an EF-1 promoter. In one embodiment, the EF-1 promoter comprises a sequence of SEQ ID NO: 1.

### Host Cells

[0962] As noted above, in some aspects the invention pertains to a cell, e.g., an immune effector cell, (e.g., a population of cells, e.g., a population of immune effector cells) comprising a nucleic acid molecule, a chimeric polypeptide molecule, or a vector as described herein.

[0963] In certain aspects of the present disclosure, immune effector cells, e.g., T cells, can be obtained from a unit of blood collected from a subject using any number of techniques known to the skilled artisan, such as Ficoll™ separation. In one preferred aspect, cells from the circulating blood of an individual are obtained by apheresis. The apheresis product typically contains lymphocytes, including T cells, monocytes, granulocytes, B cells, other nucleated white blood cells, red blood cells, and platelets. In one aspect, the cells collected by apheresis may be washed to remove the plasma fraction and, optionally, to place the cells in an appropriate buffer or media for subsequent processing steps. In one embodiment, the cells are washed with phosphate buffered saline (PBS). In an alternative embodiment, the wash solution lacks calcium and may lack magnesium or may lack many if not all divalent cations.

[0964] Initial activation steps in the absence of calcium can lead to magnified activation. As those of ordinary skill in the art would readily appreciate a washing step may be accomplished by methods known to those in the art, such as by using a semi-automated “flow-through” centrifuge (for example, the Cobe 2991 cell processor, the Baxter CytoMate, or the Haemonetics Cell Saver 5) according to the manufacturer's instructions. After washing, the cells may be resuspended in a variety of biocompatible buffers, such as, for example, Ca-free, Mg-free PBS, PlasmaLyte A, or other saline solution with or without buffer. Alternatively, the undesirable components of the apheresis sample may be removed and the cells directly resuspended in culture media.

[0965] It is recognized that the methods of the application can utilize culture media conditions comprising 5% or less, for example 2%, human AB serum, and employ known culture media conditions and compositions, for example those described in Smith et al., “Ex vivo expansion of human T cells for adoptive immunotherapy using the novel Xeno-free CTS Immune Cell Serum Replacement” Clinical & Translational Immunology (2015) 4, e31; doi:10.1038/cti.2014.31. The culture media may additionally include one or more, e.g., one, LSD1 inhibitor(s) as described herein.

[0966] In one aspect, T cells are isolated from peripheral blood lymphocytes by lysing the red blood cells and depleting the monocytes, for example, by centrifugation through a PERCOLL™ gradient or by counterflow centrifugal elutriation. Once isolated, the cells may be contacted, e.g., ex vivo, with an LSD1 inhibitor as described herein.

[0967] The methods described herein can include, e.g., selection of a specific subpopulation of immune effector cells, e.g., T cells, that are a T regulatory cell-depleted population, CD25+ depleted cells, using, e.g., a negative selection technique, e.g., described herein. Preferably, the population of T regulatory depleted cells contains less than 30%, 25%, 20%, 15%, 10%, 5%, 4%, 3%, 2%, 1% of CD25+ cells. Either before or after selection, the cells may be contacted, e.g., ex vivo, with an LSD1 inhibitor as described herein.

[0968] In one embodiment, T regulatory cells, e.g., CD25+ T cells, are removed from the population using an anti-CD25 antibody, or fragment thereof, or a CD25-binding ligand, IL-2. In one embodiment, the anti-CD25 antibody, or fragment thereof, or CD25-binding ligand is conjugated to a substrate, e.g., a bead, or is otherwise coated on a substrate, e.g., a bead. In one embodiment, the anti-CD25 antibody, or fragment thereof, is conjugated to a substrate as described herein.

[0969] In one embodiment, the T regulatory cells, e.g., CD25+ T cells, are removed from the population using CD25 depletion reagent from Miltenyi™. In one embodiment, the ratio of cells to CD25 depletion reagent is 1e7 cells to 20 uL, or 1e7 cells to 15 uL, or 1e7 cells to 10 uL, or 1e7 cells to 5 uL, or 1e7 cells to 2.5 uL, or 1e7 cells to 1.25 uL. In one embodiment, e.g., for T regulatory cells, e.g., CD25+ depletion, greater than 500 million cells/ml is used. In a further aspect, a concentration of cells of 600, 700, 800, or 900 million cells/ml is used.

[0970] In one embodiment, the population of immune effector cells to be depleted includes about 6×10⁹ CD25+ T cells. In other aspects, the population of immune effector cells to be depleted include about 1×10⁹ to 1×10¹⁰ CD25+ T cell, and any integer value in between. In one embodiment, the resulting population T regulatory depleted cells has 2×10⁹T regulatory cells, e.g., CD25+ cells, or less (e.g., 1×10⁹, 5×10⁸, 1×10⁸, 5×10⁷, 1×10⁷, or less CD25+ cells).

[0971] In one embodiment, the T regulatory cells, e.g., CD25+ cells, are removed from the population using the CliniMAC system with a depletion tubing set, such as, e.g., tubing 162-01. In one embodiment, the CliniMAC system is run on a depletion setting such as, e.g., DEPLETION2.1.

[0972] Without wishing to be bound by a particular theory, decreasing the level of negative regulators of immune cells (e.g., decreasing the number of unwanted immune cells, e.g., T_{REG} cells), in a subject prior to apheresis or during manufacturing of a CAR-expressing cell product can reduce the risk of subject relapse. For example, methods of depleting T_{REG} cells are known in the art. Methods of decreasing T_{REG} cells include, but are not limited to, cyclophosphamide, anti-GITR antibody (an anti-GITR antibody described herein), CD25-depletion, and combinations thereof. These methods may be combined with the methods of manufacture that include contacting the population of immune effector cells with an LSD1 inhibitor as described herein.

[0973] In some embodiments, the manufacturing methods comprise reducing the number of (e.g., depleting) T_{REG} cells prior to manufacturing of the CAR-expressing cell. For example, manufacturing methods comprise contacting the sample, e.g., the apheresis sample, with an anti-GITR antibody and/or an anti-CD25 antibody (or fragment thereof, or a CD25-binding ligand), e.g., to deplete T_{REG} cells prior to manufacturing of the CAR-expressing cell (e.g., T cell, NK cell) product. These methods may be combined with the methods of manufacture that include contacting the population of immune effector cells with an LSD1 inhibitor as described herein.

[0974] In an embodiment, a subject is pre-treated with one or more therapies that reduce T_{REG} cells prior to collection of cells for CAR-expressing cell product manufacturing, thereby reducing the risk of subject relapse to CAR-expressing cell treatment. In an embodiment, methods of decreasing T_{REG} cells include, but are not limited to, administration to the subject of one or more of cyclophosphamide, anti-GITR antibody, CD25-depletion, or a combination thereof. Administration of one or more of cyclophosphamide, anti-GITR antibody, CD25-depletion, or a combination thereof, can occur before, during or after an infusion of the CAR-expressing cell product. These methods may be combined with the methods of manufacture that include contacting the population of immune effector cells with an LSD1 inhibitor as described herein.

[0975] In an embodiment, a subject is pre-treated with cyclophosphamide prior to collection of cells for CAR-expressing cell product manufacturing, thereby reducing the risk of subject relapse to CAR-expressing cell treatment. In an embodiment, a subject is pre-treated with an anti-GITR antibody prior to collection of cells for CAR-expressing cell product manufacturing, thereby reducing the risk of subject relapse to CAR-expressing cell treatment. These methods may be combined with the methods of manufacture that include contacting the population of immune effector cells with an LSD1 inhibitor as described herein.

[0976] In one embodiment, the population of cells to be removed are neither the regulatory T cells or tumor cells, but cells that otherwise negatively affect the expansion and/or function of CART cells, e.g. cells expressing CD14, CD11b, CD33, CD15, or other markers expressed by potentially immune suppressive cells. In one embodiment, such cells are envisioned to be removed concurrently with regulatory T cells and/or tumor cells, or following said depletion, or in another order.

[0977] The methods described herein can include more than one selection step, e.g., more than one depletion step. Enrichment of a T cell population by negative selection can be accomplished, e.g., with a combination of antibodies directed to surface markers unique to the negatively selected cells. One method is cell sorting and/or selection via negative magnetic immunoadherence or flow cytometry that uses a cocktail of monoclonal antibodies directed to cell surface markers present on the cells negatively selected. For example, to enrich for CD4+ cells by negative selection, a monoclonal antibody cocktail can include antibodies to CD14, CD20, CD11b, CD16, HLA-DR, and CD8. These steps may be combined with the methods of manufacture that include contacting the population of immune effector cells with an LSD1 inhibitor as described herein.

[0978] The methods described herein can further include removing cells from the population which express a tumor antigen, e.g., a tumor antigen that does not comprise CD25, e.g., CD19, CD30, CD38, CD123, CD20, CD14 or CD11b, to thereby provide a population of T regulatory depleted, e.g., CD25+ depleted, and tumor antigen depleted cells that are suitable for expression of a CAR, e.g., a CAR described herein. In one embodiment, tumor antigen expressing cells are removed simultaneously with the T regulatory, e.g., CD25+ cells. For example, an anti-CD25 antibody, or fragment thereof, and an anti-tumor antigen antibody, or fragment thereof, can be attached to the same substrate, e.g., bead, which can be used to remove the cells or an anti-CD25 antibody, or fragment thereof, or the anti-tumor antigen antibody, or fragment thereof, can be attached to separate beads, a mixture of which can be used to remove the cells. In other embodiments, the removal of T regulatory cells, e.g., CD25+ cells, and the removal of the tumor antigen expressing cells is sequential, and can occur, e.g., in either order. These steps may be combined with the methods of manufacture that include contacting the population of immune effector cells with an LSD1 inhibitor as described herein.

[0979] Also provided are methods that include removing cells from the population which express a check point inhibitor, e.g., a check point inhibitor described herein, e.g., one or more of PD1+ cells, LAG3+ cells, and TIM3+ cells, to thereby provide a population of T regulatory depleted, e.g., CD25+ depleted cells, and check point inhibitor depleted cells, e.g., PD1+, LAG3+ and/or TIM3+ depleted cells. Exemplary check point inhibitors include B7-H1, B7-1, CD160, P1H, 2B4, PD1, TIM3, CEACAM (e.g., CEACAM-1, CEACAM-3 and/or CEACAM-5), LAG3, TIGIT, CTLA-4, BTLA and LAIR1. In one embodiment, check point inhibitor expressing cells are removed simultaneously with the T regulatory, e.g., CD25+ cells. For example, an anti-CD25 antibody, or fragment thereof, and an anti-check point inhibitor antibody, or fragment thereof, can be attached to the same bead which can be used to remove the cells, or an anti-CD25 antibody, or fragment thereof, and the anti-check point inhibitor antibody, or fragment there, can be attached to separate beads, a mixture of which can be used to remove the cells. In other embodiments, the removal of T regulatory cells, e.g., CD25+ cells, and the removal of the check point inhibitor expressing cells is sequential, and can occur, e.g., in either order. These steps may be combined with the methods of manufacture that include contacting the population of immune effector cells with an LSD1 inhibitor as described herein.

[0980] Methods described herein can include a positive selection step. For example, T cells can isolated by incubation with anti-CD3/anti-CD28 (e.g., 3×28)-conjugated beads, such as DYNABEADS® M-450 CD3/CD28 T, for a time period sufficient for positive selection of the desired T cells. In one embodiment, the time period is about 30 minutes. In a further embodiment, the time period ranges from 30 minutes to 36 hours or longer and all integer values there between. In a further embodiment, the time period is at least 1, 2, 3, 4, 5, or 6 hours. In yet another embodiment, the time period is 10 to 24 hours, e.g., 24 hours. Longer incubation times may be used to isolate T cells in any situation where there are few T cells as compared to other cell types, such in isolating tumor infiltrating lymphocytes (TIL) from tumor tissue or from immunocompromised individuals. Further, use of longer incubation times can increase the efficiency of capture of CD8+ T cells. Thus, by simply shortening or lengthening the time T cells are allowed to bind to the CD3/CD28 beads and/or by increasing or decreasing the ratio of beads to T cells (as described further herein), subpopulations of T cells can be preferentially selected for or against at culture initiation or at other time points during the process. Additionally, by increasing or decreasing the ratio of anti-CD3 and/or anti-CD28 antibodies on the beads or other surface, subpopulations of T cells can be preferentially selected for or against at culture initiation or at other desired time points. These steps may be combined with the methods of manufacture that include contacting the population of immune effector cells with an LSD1 inhibitor as described herein.

[0981] In one embodiment, a T cell population can be selected that expresses one or more of IFN-^{γ}, TNFα, IL-17A, IL-2, IL-3, IL-4, GM-CSF, IL-10, IL-13, granzyme B, and perforin, or other appropriate molecules, e.g., other cytokines. Methods for screening for cell expression can be determined, e.g., by the methods described in PCT Publication No.: WO 2013/126712.

[0982] For isolation of a desired population of cells by positive or negative selection, the concentration of cells and surface (e.g., particles such as beads) can be varied. In certain aspects, it may be desirable to significantly decrease the volume in which beads and cells are mixed together (e.g., increase the concentration of cells), to ensure maximum contact of cells and beads. For example, in one aspect, a concentration of 10 billion cells/ml, 9 billion/ml, 8 billion/ml, 7 billion/ml, 6 billion/ml, or 5 billion/ml is used. In one aspect, a concentration of 1 billion cells/ml is used. In yet one aspect, a concentration of cells from 75, 80, 85, 90, 95, or 100 million cells/ml is used. In further aspects, concentrations of 125 or 150 million cells/ml can be used.

[0983] Using high concentrations can result in increased cell yield, cell activation, and cell expansion. Further, use of high cell concentrations allows more efficient capture of cells that may weakly express target antigens of interest, such as CD28-negative T cells, or from samples where there are many tumor cells present (e.g., leukemic blood, tumor tissue, etc.). Such populations of cells may have therapeutic value and would be desirable to obtain. For example, using high concentration of cells allows more efficient selection of CD8+ T cells that normally have weaker CD28 expression.

[0984] In a related aspect, it may be desirable to use lower concentrations of cells. By significantly diluting the mixture of T cells and surface (e.g., particles such as beads), interactions between the particles and cells are minimized. This selects for cells that express high amounts of desired antigens to be bound to the particles. For example, CD4+ T cells express higher levels of CD28 and are more efficiently captured than CD8+ T cells in dilute concentrations. In one aspect, the concentration of cells used is 5×10⁶/ml. In other aspects, the concentration used can be from about 1×10⁵/ml to 1×10⁶/ml, and any integer value in between.

[0985] In other aspects, the cells may be incubated on a rotator for varying lengths of time at varying speeds at either 2-10° C. or at room temperature.

[0986] T cells for stimulation can also be frozen after a washing step. Wishing not to be bound by theory, the freeze and subsequent thaw step provide a more uniform product by removing granulocytes and to some extent monocytes in the cell population. After the washing step that removes plasma and platelets, the cells may be suspended in a freezing solution. While many freezing solutions and parameters are known in the art and will be useful in this context, one method involves using PBS containing 20% DMSO and 8% human serum albumin, or culture media containing 10% Dextran 40 and 5% Dextrose, 20% Human Serum Albumin and 7.5% DMSO, or 31.25% Plasmalyte-A, 31.25% Dextrose 5%, 0.45% NaCl, 10% Dextran 40 and 5% Dextrose, 20% Human Serum Albumin, and 7.5% DMSO or other suitable cell freezing media containing for example, Hespan and PlasmaLyte A, the cells then are frozen to −80° C. at a rate of 1° per minute and stored in the vapor phase of a liquid nitrogen storage tank. Other methods of controlled freezing may be used as well as uncontrolled freezing immediately at −20° C. or in liquid nitrogen.

[0987] In certain aspects, cryopreserved cells are thawed and washed as described herein and allowed to rest for one hour at room temperature prior to activation using the methods of the present invention.

[0988] Also contemplated in the context of the invention is the collection of blood samples or apheresis product from a subject at a time period prior to when the expanded cells as described herein might be needed. As such, the source of the cells to be expanded can be collected at any time point necessary, and desired cells, such as T cells, can be isolated and frozen for later use in immune effector cell therapy for any number of diseases or conditions that would benefit from immune effector cell therapy, such as those described herein. In one aspect a blood sample or an apheresis is taken from a generally healthy subject. In certain aspects, a blood sample or an apheresis is taken from a generally healthy subject who is at risk of developing a disease, but who has not yet developed a disease, and the cells of interest are isolated and frozen for later use. In certain aspects, the T cells may be expanded, frozen, and used at a later time. In certain aspects, samples are collected from a patient shortly after diagnosis of a particular disease as described herein but prior to any treatments. In a further aspect, the cells are isolated from a blood sample or an apheresis from a subject prior to any number of relevant treatment modalities, including but not limited to treatment with agents such as natalizumab, efalizumab, antiviral agents, chemotherapy, radiation, immunosuppressive agents, such as cyclosporin, azathioprine, methotrexate, mycophenolate, and FK506, antibodies, or other immunoablative agents such as CAMPATH, anti-CD3 antibodies, cytoxan, fludarabine, cyclosporin, FK506, rapamycin, mycophenolic acid, steroids, FR901228, and irradiation.

[0989] In a further aspect of the present invention, T cells are obtained from a patient directly following treatment that leaves the subject with functional T cells. In this regard, it has been observed that following certain cancer treatments, in particular treatments with drugs that damage the immune system, shortly after treatment during the period when patients would normally be recovering from the treatment, the quality of T cells obtained may be optimal or improved for their ability to expand ex vivo. Likewise, following ex vivo manipulation using the methods described herein, these cells may be in a preferred state for enhanced engraftment and in vivo expansion. Thus, it is contemplated within the context of the present invention to collect blood cells, including T cells, dendritic cells, or other cells of the hematopoietic lineage, during this recovery phase. Further, in certain aspects, mobilization (for example, mobilization with GM-CSF) and conditioning regimens can be used to create a condition in a subject wherein repopulation, recirculation, regeneration, and/or expansion of particular cell types is favored, especially during a defined window of time following therapy. Illustrative cell types include T cells, B cells, dendritic cells, and other cells of the immune system.

[0990] In one embodiment, the immune effector cells expressing a CAR molecule, e.g., a CAR molecule described herein, are obtained from a subject that has received an LSD1 inhibitor. In an embodiment, the population of immune effector cells, e.g., T cells, to be engineered to express a CAR, are harvested after a sufficient time, or after sufficient dosing of the LSD1 inhibitor, such that the level of PD1 negative immune effector cells, e.g., T cells, or the ratio of PD1 negative immune effector cells, e.g., T cells/PD1 positive immune effector cells, e.g., T cells, in the subject or harvested from the subject has been, at least transiently, increased.

[0991] In other embodiments, population of immune effector cells, e.g., T cells, which have, or will be engineered to express a CAR, can be treated ex vivo by contact with an amount of an LSD1 inhibitor that increases the number of PD1 negative immune effector cells, e.g., T cells or increases the ratio of PD1 negative immune effector cells, e.g., T cells/PD1 positive immune effector cells, e.g., T cells.

[0992] In one embodiment, a T cell population is diaglycerol kinase (DGK)-deficient. DGK-deficient cells include cells that do not express DGK RNA or protein, or have reduced or inhibited DGK activity. DGK-deficient cells can be generated by genetic approaches, e.g., administering RNA-interfering agents, e.g., siRNA, shRNA, miRNA, to reduce or prevent DGK expression. Alternatively, DGK-deficient cells can be generated by treatment with DGK inhibitors described herein.

[0993] In one embodiment, a T cell population is Ikaros-deficient. Ikaros-deficient cells include cells that do not express Ikaros RNA or protein, or have reduced or inhibited Ikaros activity, Ikaros-deficient cells can be generated by genetic approaches, e.g., administering RNA-interfering agents, e.g., siRNA, shRNA, miRNA, to reduce or prevent Ikaros expression. Alternatively, Ikaros-deficient cells can be generated by treatment with Ikaros inhibitors, e.g., lenalidomide.

[0994] In embodiments, a T cell population is DGK-deficient and Ikaros-deficient, e.g., does not express DGK and Ikaros, or has reduced or inhibited DGK and Ikaros activity. Such DGK and Ikaros-deficient cells can be generated by any of the methods described herein.

[0995] In an embodiment, the NK cells are obtained from the subject. In another embodiment, the NK cells are an NK cell line, e.g., NK-92 cell line (Conkwest).

### Additional Expressed Agents

[0996] In another embodiment, a CAR-expressing immune effector cell described herein can further express another agent, e.g., an agent which enhances the activity of a CAR-expressing cell. For example, in one embodiment, the agent can be an agent which inhibits an inhibitory molecule. Examples of inhibitory molecules include PD-1, PD-L1, CTLA-4, TIM-3, CEACAM (e.g., CEACAM-1, CEACAM-3 and/or CEACAM-5), LAG-3, VISTA, BTLA, TIGIT, LAIR1, CD160, 2B4 and TGF beta, e.g., as described herein. In one embodiment, the agent that inhibits an inhibitory molecule comprises a first polypeptide, e.g., an inhibitory molecule, associated with a second polypeptide that provides a positive signal to the cell, e.g., an intracellular signaling domain described herein. In one embodiment, the agent comprises a first polypeptide, e.g., of an inhibitory molecule such as PD-1, PD-L1, CTLA-4, TIM-3, CEACAM (e.g., CEACAM-1, CEACAM-3 and/or CEACAM-5), LAG-3, VISTA, BTLA, TIGIT, LAIR1, CD160, 2B4 or TGF beta, or a fragment of any of these, and a second polypeptide which is an intracellular signaling domain described herein (e.g., comprising a costimulatory domain (e.g., 41BB, CD27 or CD28, e.g., as described herein) and/or a primary signaling domain (e.g., a CD3 zeta signaling domain described herein). In one embodiment, the agent comprises a first polypeptide of PD-1 or a fragment thereof, and a second polypeptide of an intracellular signaling domain described herein (e.g., a CD28, CD27, OX40 or 4-IBB signaling domain described herein and/or a CD3 zeta signaling domain described herein).

[0997] In one embodiment, the CAR-expressing immune effector cell described herein can further comprise a second CAR, e.g., a second CAR that includes a different antigen binding domain, e.g., to the same target (e.g., a target described above) or a different target. In one embodiment, the second CAR includes an antigen binding domain to a target expressed on the same cancer cell type as the target of the first CAR. In one embodiment, the CAR-expressing immune effector cell comprises a first CAR that targets a first antigen and includes an intracellular signaling domain having a costimulatory signaling domain but not a primary signaling domain, and a second CAR that targets a second, different, antigen and includes an intracellular signaling domain having a primary signaling domain but not a costimulatory signaling domain.

[0998] While not wishing to be bound by theory, placement of a costimulatory signaling domain, e.g., 4-1BB, CD28, CD27 or OX-40, onto the first CAR, and the primary signaling domain, e.g., CD3 zeta, on the second CAR can limit the CAR activity to cells where both targets are expressed. In one embodiment, the CAR expressing immune effector cell comprises a first CAR that includes an antigen binding domain that targets, e.g., a target described above, a transmembrane domain and a costimulatory domain and a second CAR that targets an antigen other than antigen targeted by the first CAR (e.g., an antigen expressed on the same cancer cell type as the first target) and includes an antigen binding domain, a transmembrane domain and a primary signaling domain. In another embodiment, the CAR expressing immune effector cell comprises a first CAR that includes an antigen binding domain that targets, e.g., a target described above, a transmembrane domain and a primary signaling domain and a second CAR that targets an antigen other than antigen targeted by the first CAR (e.g., an antigen expressed on the same cancer cell type as the first target) and includes an antigen binding domain to the antigen, a transmembrane domain and a costimulatory signaling domain.

[0999] In one embodiment, the CAR-expressing immune effector cell comprises a CAR described herein, e.g., a CAR to a target described above, and an inhibitory CAR. In one embodiment, the inhibitory CAR comprises an antigen binding domain that binds an antigen found on normal cells but not cancer cells, e.g., normal cells that also express the target. In one embodiment, the inhibitory CAR comprises the antigen binding domain, a transmembrane domain and an intracellular domain of an inhibitory molecule. For example, the intracellular domain of the inhibitory CAR can be an intracellular domain of PD1, PD-L1, CTLA-4, TIM-3, CEACAM (e.g., CEACAM-1, CEACAM-3 and/or CEACAM-5), LAG-3, VISTA, BTLA, TIGIT, LAIR1, CD160, 2B4 or TGF beta.

[1000] In one embodiment, an immune effector cell (e.g., T cell, NK cell) comprises a first CAR comprising an antigen binding domain that binds to a tumor antigen as described herein, and a second CAR comprising a PD1 extracellular domain or a fragment thereof.

[1001] In one embodiment, the cell further comprises an inhibitory molecule as described above.

[1002] In one embodiment, the second CAR in the cell is an inhibitory CAR, wherein the inhibitory CAR comprises an antigen binding domain, a transmembrane domain, and an intracellular domain of an inhibitory molecule. The inhibitory molecule can be chosen from one or more of: PD1, PD-L1, CTLA-4, TIM-3, LAG-3, VISTA, BTLA, TIGIT, LAIR1, CD160, 2B4, TGF beta, CEACAM-1, CEACAM-3, and CEACAM-5. In one embodiment, the second CAR molecule comprises the extracellular domain of PD1 or a fragment thereof.

[1003] In embodiments, the second CAR molecule in the cell further comprises an intracellular signaling domain comprising a primary signaling domain and/or an intracellular signaling domain.

[1004] In other embodiments, the intracellular signaling domain in the cell comprises a primary signaling domain comprising the functional domain of CD3 zeta and a costimulatory signaling domain comprising the functional domain of 4-113B.

[1005] In one embodiment, the second CAR molecule in the cell comprises the amino acid sequence of SEQ ID NO: 26.

[1006] In certain embodiments, the antigen binding domain of the first CAR molecule comprises a scFv and the antigen binding domain of the second CAR molecule does not comprise a scFv. For example, the antigen binding domain of the first CAR molecule comprises a scFv and the antigen binding domain of the second CAR molecule comprises a camelid VHH domain.

### Split CAR

[1007] In some embodiments, the CAR-expressing cell uses a split CAR. The split CAR approach is described in more detail in publications WO2014/055442 and WO2014/055657. Briefly, a split CAR system comprises a cell expressing a first CAR having a first antigen binding domain and a costimulatory domain (e.g., 41BB), and the cell also expresses a second CAR having a second antigen binding domain and an intracellular signaling domain (e.g., CD3 zeta). When the cell encounters the first antigen, the costimulatory domain is activated, and the cell proliferates. When the cell encounters the second antigen, the intracellular signaling domain is activated and cell-killing activity begins. Thus, the CAR-expressing cell is only fully activated in the presence of both antigens.

### Multiple CAR Expression

[1008] In one aspect, the CAR-expressing cell described herein can further comprise a second CAR, e.g., a second CAR that includes a different antigen binding domain, e.g., to the same target or a different target (e.g., a target other than a cancer associated antigen described herein or a different cancer associated antigen described herein). In one embodiment, the second CAR includes an antigen binding domain to a target expressed the same cancer cell type as the cancer associated antigen. In one embodiment, the CAR-expressing cell comprises a first CAR that targets a first antigen and includes an intracellular signaling domain having a costimulatory signaling domain but not a primary signaling domain, and a second CAR that targets a second, different, antigen and includes an intracellular signaling domain having a primary signaling domain but not a costimulatory signaling domain. While not wishing to be bound by theory, placement of a costimulatory signaling domain, e.g., 4-1BB, CD28, CD27 or OX-40, onto the first CAR, and the primary signaling domain, e.g., CD3 zeta, on the second CAR can limit the CAR activity to cells where both targets are expressed. In one embodiment, the CAR expressing cell comprises a first cancer associated antigen CAR that includes an antigen binding domain that binds a target antigen described herein, a transmembrane domain and a costimulatory domain and a second CAR that targets a different target antigen (e.g., an antigen expressed on that same cancer cell type as the first target antigen) and includes an antigen binding domain, a transmembrane domain and a primary signaling domain. In another embodiment, the CAR expressing cell comprises a first CAR that includes an antigen binding domain that binds a target antigen described herein, a transmembrane domain and a primary signaling domain and a second CAR that targets an antigen other than the first target antigen (e.g., an antigen expressed on the same cancer cell type as the first target antigen) and includes an antigen binding domain to the antigen, a transmembrane domain and a costimulatory signaling domain.

[1009] In some embodiments, the claimed invention comprises a first and second CAR, wherein the antigen binding domain of one of said first CAR said second CAR does not comprise a variable light domain and a variable heavy domain. In some embodiments, the antigen binding domain of one of said first CAR said second CAR is an scFv, and the other is not an scFv. In some embodiments, the antigen binding domain of one of said first CAR said second CAR comprises a single VH domain, e.g., a camelid, shark, or lamprey single VH domain, or a single VH domain derived from a human or mouse sequence. In some embodiments, the antigen binding domain of one of said first CAR said second CAR comprises a nanobody. In some embodiments, the antigen binding domain of one of said first CAR said second CAR comprises a camelid VHH domain.

### Allogeneic Cells

[1010] In embodiments described herein, the immune effector cell can be an allogeneic immune effector cell, e.g., T cell or NK cell. For example, the cell can be an allogeneic T cell, e.g., an allogeneic T cell lacking expression of a functional T cell receptor (TCR) and/or human leukocyte antigen (HLA), e.g., HLA class I and/or HLA class II.

[1011] A T cell lacking a functional TCR can be, e.g., engineered such that it does not express any functional TCR on its surface, engineered such that it does not express one or more subunits that comprise a functional TCR or engineered such that it produces very little functional TCR on its surface. Alternatively, the T cell can express a substantially impaired TCR, e.g., by expression of mutated or truncated forms of one or more of the subunits of the TCR. The term “substantially impaired TCR” means that this TCR will not elicit an adverse immune reaction in a host.

[1012] A T cell described herein can be, e.g., engineered such that it does not express a functional HLA on its surface. For example, a T cell described herein, can be engineered such that cell surface expression HLA, e.g., HLA class 1 and/or HLA class II, is downregulated.

[1013] In some embodiments, the T cell can lack a functional TCR and a functional HLA, e.g., HLA class I and/or HLA class II.

[1014] Modified T cells that lack expression of a functional TCR and/or HLA can be obtained by any suitable means, including a knock out or knock down of one or more subunit of TCR or HLA. For example, the T cell can include a knock down of TCR and/or HLA using siRNA, shRNA, clustered regularly interspaced short palindromic repeats (CRISPR) transcription-activator like effector nuclease (TALEN), or zinc finger endonuclease (ZFN).

[1015] In some embodiments, the allogeneic cell can be a cell which does not express or expresses at low levels an inhibitory molecule, e.g. by any method described herein. For example, the cell can be a cell that does not express or expresses at low levels an inhibitory molecule, e.g., that can decrease the ability of a CAR-expressing cell to mount an immune effector response. Examples of inhibitory molecules include PD1, PD-L1, CTLA4, TIM3, CEACAM (e.g., CEACAM-1, CEACAM-3 and/or CEACAM-5), LAG3, VISTA, BTLA, TIGIT, LAIR1, CD160, 2B4 and TGF beta. Inhibition of an inhibitory molecule, e.g., by inhibition at the DNA, RNA or protein level, can optimize a CAR-expressing cell performance. In embodiments, an inhibitory nucleic acid, e.g., an inhibitory nucleic acid, e.g., a dsRNA, e.g., an siRNA or shRNA, a clustered regularly interspaced short palindromic repeats (CRISPR), a transcription-activator like effector nuclease (TALEN), or a zinc finger endonuclease (ZFN), e.g., as described herein, can be used.

siRNA and shRNA to Inhibit TCR or HLA

[1016] In some embodiments, TCR expression and/or HLA expression can be inhibited using siRNA or shRNA that targets a nucleic acid encoding a TCR and/or HLA in a T cell.

### CRISPR Systems to Inhibit TCR or HLA

[1017] “CRISPR system to TCR and/or HLA” or “CRISPR to inhibit TCR and/or HLA” as used herein refers to a CRISPR system (e.g., a CRISPR/Cas9 system) comprising one or more guide RNA molecules comprising a targeting domain complementary to target sequence within a gene for a component of the TCR and/or HLA or beta-2 microglobulin (B2M), and a RNA-guided endonuclease (e.g., a Cas, e.g., a Cas9).

[1018] Artificial CRISPR/Cas systems can be generated which inhibit TCR and/or HLA, using technology known in the art, e.g., that are described in U.S. Publication No. 20140068797, and Cong (2013) Science 339: 819-823. Other artificial CRISPR/Cas systems that are known in the art may also be generated which inhibit TCR and/or HLA, e.g., that described in Tsai (2014) Nature Biotechnol., 32:6 569-576, U.S. Pat. Nos. 8,871,445; 8,865,406; 8,795,965; 8,771,945; and 8,697,359.

TALEN to Inhibit TCR and/or HLA

[1019] “TALEN genome editing system to HLA and/or TCR” or “TALEN to inhibit HLA and/or TCR” refers to a transcription activator-like effector nuclease, an artificial nuclease which can be used to edit the HLA and/or TCR gene.

[1020] TALENs are produced artificially by fusing a TAL effector DNA binding domain to a DNA cleavage domain. Transcription activator-like effects (TALEs) can be engineered to bind any desired DNA sequence, including a portion of the HLA or TCR gene. By combining an engineered TALE with a DNA cleavage domain, a restriction enzyme can be produced which is specific to any desired DNA sequence, including a HLA or TCR sequence. These can then be introduced into a cell, wherein they can be used for genome editing. Boch (2011) Nature Biotech. 29: 135-6; and Boch et al. (2009) Science 326: 1509-12; Moscou et al. (2009) Science 326: 3501.

[1021] TALENs specific to sequences in HLA or TCR can be constructed using any method known in the art, including various schemes using modular components. Zhang et al. (2011) Nature Biotech. 29: 149-53; Geibler et al. (2011) PLoS ONE 6: e19509.

Zinc Finger Nuclease to Inhibit HLA and/or TCR

[1022] “ZFN genome editing system to HLA and/or TCR” or “ZFN to inhibit HLA and/or TCR” refer to a zinc finger nuclease, an artificial nuclease which can be used to edit the HLA and/or TCR gene.

[1023] ZFNs specific to sequences in HLA AND/OR TCR can be constructed using any method known in the art. See, e.g., Provasi (2011) Nature Med. 18: 807-815; Torikai (2013) Blood 122: 1341-1349; Cathomen et al. (2008) Mol. Ther. 16: 1200-7; Guo et al. (2010) J. Mol. Biol. 400: 96; U.S. Patent Publication 2011/0158957; and U.S. Patent Publication 2012/0060230.

### Telomerase Expression

[1024] While not wishing to be bound by any particular theory, in some embodiments, a therapeutic T cell has short term persistence in a patient, due to shortened telomeres in the T cell; accordingly, transfection with a telomerase gene can lengthen the telomeres of the T cell and improve persistence of the T cell in the patient. See Carl June, “Adoptive T cell therapy for cancer in the clinic”, Journal of Clinical Investigation, 117:1466-1476 (2007). Thus, in an embodiment, an immune effector cell, e.g., a T cell, ectopically expresses a telomerase subunit, e.g., the catalytic subunit of telomerase, e.g., TERT, e.g., hTERT. In some aspects, this disclosure provides a method of producing a CAR-expressing cell, comprising contacting a cell with a nucleic acid encoding a telomerase subunit, e.g., the catalytic subunit of telomerase, e.g., TERT, e.g., hTERT. The cell may be contacted with the nucleic acid before, simultaneous with, or after being contacted with a construct encoding a CAR.

### Expansion and Activation

[1025] Immune effector cells such as T cells may be activated and expanded generally using methods as described, for example, in U.S. Pat. Nos. 6,352,694; 6,534,055; 6,905,680; 6,692,964; 5,858,358; 6,887,466; 6,905,681; 7,144,575; 7,067,318; 7,172,869; 7,232,566; 7,175,843; 5,883,223; 6,905,874; 6,797,514; 6,867,041; and U.S. Patent Application Publication No. 20060121005, each of which is incorporated by reference in its entirety.

[1026] Generally, a population of immune effector cells e.g., T cells, may be expanded by contact with a surface having attached thereto an agent that stimulates a CD3/TCR complex associated signal and a ligand that stimulates a costimulatory molecule on the surface of the T cells. In particular, T cell populations may be stimulated as described herein, such as by contact with an anti-CD3 antibody, or antigen-binding fragment thereof, or an anti-CD2 antibody immobilized on a surface, or by contact with a protein kinase C activator (e.g., bryostatin) in conjunction with a calcium ionophore. For co-stimulation of an accessory molecule on the surface of the T cells, a ligand that binds the accessory molecule is used. For example, a population of T cells can be contacted with an anti-CD3 antibody and an anti-CD28 antibody, under conditions appropriate for stimulating proliferation of the T cells. To stimulate proliferation of either CD4+ T cells or CD8+ T cells, an anti-CD3 antibody and an anti-CD28 antibody can be used. Examples of an anti-CD28 antibody include 9.3, B-T3, XR-CD28 (Diaclone, Besancon, France) can be used as can other methods commonly known in the art (Berg et al., Transplant Proc. 30(8):3975-3977, 1998; Haanen et al., J. Exp. Med. 190(9):13191328, 1999; Garland et al., J. Immunol Meth. 227(1-2):53-63, 1999).

[1027] In certain aspects, the primary stimulatory signal and the costimulatory signal for the T cell may be provided by different protocols. For example, the agents providing each signal may be in solution or coupled to a surface. When coupled to a surface, the agents may be coupled to the same surface (i.e., in “cis” formation) or to separate surfaces (i.e., in “trans” formation). Alternatively, one agent may be coupled to a surface and the other agent in solution. In one aspect, the agent providing the costimulatory signal is bound to a cell surface and the agent providing the primary activation signal is in solution or coupled to a surface. In certain aspects, both agents can be in solution. In one aspect, the agents may be in soluble form, and then cross-linked to a surface, such as a cell expressing Fc receptors or an antibody or other binding agent which will bind to the agents. In this regard, see for example, U.S. Patent Application Publication Nos. 20040101519 and 20060034810 for artificial antigen presenting cells (aAPCs) that are contemplated for use in activating and expanding T cells in the present invention.

[1028] In one aspect, the two agents are immobilized on beads, either on the same bead, i.e., “cis,” or to separate beads, i.e., “trans.” By way of example, the agent providing the primary activation signal is an anti-CD3 antibody or an antigen-binding fragment thereof and the agent providing the costimulatory signal is an anti-CD28 antibody or antigen-binding fragment thereof; and both agents are co-immobilized to the same bead in equivalent molecular amounts. In one aspect, a 1:1 ratio of each antibody bound to the beads for CD4+ T cell expansion and T cell growth is used. In certain aspects of the present invention, a ratio of anti CD3:CD28 antibodies bound to the beads is used such that an increase in T cell expansion is observed as compared to the expansion observed using a ratio of 1:1. In one particular aspect an increase of from about 1 to about 3 fold is observed as compared to the expansion observed using a ratio of 1:1. In one aspect, the ratio of CD3:CD28 antibody bound to the beads ranges from 100:1 to 1:100 and all integer values there between. In one aspect, more anti-CD28 antibody is bound to the particles than anti-CD3 antibody, i.e., the ratio of CD3:CD28 is less than one. In certain aspects, the ratio of anti CD28 antibody to anti CD3 antibody bound to the beads is greater than 2:1. In one particular aspect, a 1:100 CD3:CD28 ratio of antibody bound to beads is used. In one aspect, a 1:75 CD3:CD28 ratio of antibody bound to beads is used. In a further aspect, a 1:50 CD3:CD28 ratio of antibody bound to beads is used. In one aspect, a 1:30 CD3:CD28 ratio of antibody bound to beads is used. In one preferred aspect, a 1:10 CD3:CD28 ratio of antibody bound to beads is used. In one aspect, a 1:3 CD3:CD28 ratio of antibody bound to the beads is used. In yet one aspect, a 3:1 CD3:CD28 ratio of antibody bound to the beads is used.

[1029] Ratios of particles to cells from 1:500 to 500:1 and any integer values in between may be used to stimulate T cells or other target cells. As those of ordinary skill in the art can readily appreciate, the ratio of particles to cells may depend on particle size relative to the target cell. For example, small sized beads could only bind a few cells, while larger beads could bind many. In certain aspects the ratio of cells to particles ranges from 1:100 to 100:1 and any integer values in-between and in further aspects the ratio comprises 1:9 to 9:1 and any integer values in between, can also be used to stimulate T cells. The ratio of anti-CD3- and anti-CD28-coupled particles to T cells that result in T cell stimulation can vary as noted above, however certain preferred values include 1:100, 1:50, 1:40, 1:30, 1:20, 1:10, 1:9, 1:8, 1:7, 1:6, 1:5, 1:4, 1:3, 1:2, 1:1, 2:1, 3:1, 4:1, 5:1, 6:1, 7:1, 8:1, 9:1, 10:1, and 15:1 with one preferred ratio being at least 1:1 particles per T cell. In one aspect, a ratio of particles to cells of 1:1 or less is used. In one particular aspect, a preferred particle: cell ratio is 1:5. In further aspects, the ratio of particles to cells can be varied depending on the day of stimulation. For example, in one aspect, the ratio of particles to cells is from 1:1 to 10:1 on the first day and additional particles are added to the cells every day or every other day thereafter for up to 10 days, at final ratios of from 1:1 to 1:10 (based on cell counts on the day of addition). In one particular aspect, the ratio of particles to cells is 1:1 on the first day of stimulation and adjusted to 1:5 on the third and fifth days of stimulation. In one aspect, particles are added on a daily or every other day basis to a final ratio of 1:1 on the first day, and 1:5 on the third and fifth days of stimulation. In one aspect, the ratio of particles to cells is 2:1 on the first day of stimulation and adjusted to 1:10 on the third and fifth days of stimulation. In one aspect, particles are added on a daily or every other day basis to a final ratio of 1:1 on the first day, and 1:10 on the third and fifth days of stimulation. One of skill in the art will appreciate that a variety of other ratios may be suitable for use in the present invention. In particular, ratios will vary depending on particle size and on cell size and type. In one aspect, the most typical ratios for use are in the neighborhood of 1:1, 2:1 and 3:1 on the first day.

[1030] In further aspects, the cells, such as T cells, are combined with agent-coated beads, the beads and the cells are subsequently separated, and then the cells are cultured. In an alternative aspect, prior to culture, the agent-coated beads and cells are not separated but are cultured together. In a further aspect, the beads and cells are first concentrated by application of a force, such as a magnetic force, resulting in increased ligation of cell surface markers, thereby inducing cell stimulation.

[1031] By way of example, cell surface proteins may be ligated by allowing paramagnetic beads to which anti-CD3 and anti-CD28 are attached (3×28 beads) to contact the T cells. In one aspect the cells (for example, 10⁴ to 10⁹T cells) and beads (for example, DYNABEADS® M-450 CD3/CD28 T paramagnetic beads at a ratio of 1:1) are combined in a buffer, for example PBS (without divalent cations such as, calcium and magnesium). Again, those of ordinary skill in the art can readily appreciate any cell concentration may be used. For example, the target cell may be very rare in the sample and comprise only 0.01% of the sample or the entire sample (i.e., 100%) may comprise the target cell of interest. Accordingly, any cell number is within the context of the present invention. In certain aspects, it may be desirable to significantly decrease the volume in which particles and cells are mixed together (i.e., increase the concentration of cells), to ensure maximum contact of cells and particles. For example, in one aspect, a concentration of about 10 billion cells/ml, 9 billion/ml, 8 billion/ml, 7 billion/ml, 6 billion/ml, 5 billion/ml, or 2 billion cells/ml is used. In one aspect, greater than 100 million cells/ml is used. In a further aspect, a concentration of cells of 10, 15, 20, 25, 30, 35, 40, 45, or 50 million cells/ml is used. In yet one aspect, a concentration of cells from 75, 80, 85, 90, 95, or 100 million cells/ml is used. In further aspects, concentrations of 125 or 150 million cells/ml can be used. Using high concentrations can result in increased cell yield, cell activation, and cell expansion. Further, use of high cell concentrations allows more efficient capture of cells that may weakly express target antigens of interest, such as CD28-negative T cells. Such populations of cells may have therapeutic value and would be desirable to obtain in certain aspects. For example, using high concentration of cells allows more efficient selection of CD8+ T cells that normally have weaker CD28 expression.

[1032] In one embodiment, cells transduced with a nucleic acid encoding a CAR, e.g., a CAR described herein, are expanded, e.g., by a method described herein. In one embodiment, the cells are expanded in culture for a period of several hours (e.g., about 2, 3, 4, 5, 6, 7, 8, 9, 10, 15, 18, 21 hours) to about 14 days (e.g., 1, 2, 3, 4, 5, 6, 7, 8, 9, 10, 11, 12, 13 or 14 days). In one embodiment, the cells are expanded for a period of 4 to 9 days. In one embodiment, the cells are expanded for a period of 8 days or less, e.g., 7, 6 or 5 days. In one embodiment, the cells are expanded in culture for 5 days, and the resulting cells are more potent than the same cells expanded in culture for 9 days under the same culture conditions. Potency can be defined, e.g., by various T cell functions, e.g. proliferation, target cell killing, cytokine production, activation, migration, or combinations thereof. In one embodiment, the cells are expanded for 5 days show at least a one, two, three or four fold increase in cells doublings upon antigen stimulation as compared to the same cells expanded in culture for 9 days under the same culture conditions. In one embodiment, the cells are expanded in culture for 5 days, and the resulting cells exhibit higher proinflammatory cytokine production, e.g., IFN-γ and/or GM-CSF levels, as compared to the same cells expanded in culture for 9 days under the same culture conditions. In one embodiment, the cells expanded for 5 days show at least a one, two, three, four, five, ten fold or more increase in pg/ml of proinflammatory cytokine production, e.g., IFN-γ and/or GM-CSF levels, as compared to the same cells expanded in culture for 9 days under the same culture conditions.

[1033] Several cycles of stimulation may also be desired such that culture time of T cells can be 60 days or more. Conditions appropriate for T cell culture include an appropriate media (e.g., Minimal Essential Media or RPMI Media 1640 or, X-vivo 15, (Lonza)) that may contain factors necessary for proliferation and viability, including serum (e.g., fetal bovine or human serum), interleukin-2 (IL-2), insulin, IFN-γ, IL-4, IL-7, GM-CSF, IL-10, IL-12, IL-15, TGFβ, and TNF-α or any other additives for the growth of cells known to the skilled artisan. Other additives for the growth of cells include, but are not limited to, surfactant, plasmanate, and reducing agents such as N-acetyl-cysteine and 2-mercaptoethanol. Media can include RPMI 1640, AIM-V, DMEM, MEM, α-MEM, F-12, X-Vivo 15, and X-Vivo 20, Optimizer, with added amino acids, sodium pyruvate, and vitamins, either serum-free or supplemented with an appropriate amount of serum (or plasma) or a defined set of hormones, and/or an amount of cytokine(s) sufficient for the growth and expansion of T cells. Antibiotics, e.g., penicillin and streptomycin, are included only in experimental cultures, not in cultures of cells that are to be infused into a subject. The target cells are maintained under conditions necessary to support growth, for example, an appropriate temperature (e.g., 37° C.) and atmosphere (e.g., air plus 5% CO₂).

[1034] In one embodiment, the cells are expanded in an appropriate media (e.g., media described herein) that includes one or more interleukin that result in at least a 200-fold (e.g., 200-fold, 250-fold, 300-fold, 350-fold) increase in cells over a 14 day expansion period, e.g., as measured by a method described herein such as flow cytometry. In one embodiment, the cells are expanded in the presence of IL-15 and/or IL-7 (e.g., IL-15 and IL-7).

[1035] In embodiments, methods described herein, e.g., CAR-expressing cell manufacturing methods, comprise removing T regulatory cells, e.g., CD25+ T cells, from a cell population, e.g., using an anti-CD25 antibody, or fragment thereof, or a CD25-binding ligand, IL-2. Methods of removing T regulatory cells, e.g., CD25+ T cells, from a cell population are described herein. In embodiments, the methods, e.g., manufacturing methods, further comprise contacting a cell population (e.g., a cell population in which T regulatory cells, such as CD25+ T cells, have been depleted; or a cell population that has previously contacted an anti-CD25 antibody, fragment thereof, or CD25-binding ligand) with IL-15 and/or IL-7. For example, the cell population (e.g., that has previously contacted an anti-CD25 antibody, fragment thereof, or CD25-binding ligand) is expanded in the presence of IL-15 and/or IL-7.

[1036] In some embodiments a CAR-expressing cell described herein is contacted with a composition comprising a interleukin-15 (IL-15) polypeptide, a interleukin-15 receptor alpha (IL-15Ra) polypeptide, or a combination of both a IL-15 polypeptide and a IL-15Ra polypeptide e.g., hetIL-15, during the manufacturing of the CAR-expressing cell, e.g., ex vivo. In embodiments, a CAR-expressing cell described herein is contacted with a composition comprising a IL-15 polypeptide during the manufacturing of the CAR-expressing cell, e.g., ex vivo. In embodiments, a CAR-expressing cell described herein is contacted with a composition comprising a combination of both a IL-15 polypeptide and a IL-15 Ra polypeptide during the manufacturing of the CAR-expressing cell, e.g., ex vivo. In embodiments, a CAR-expressing cell described herein is contacted with a composition comprising hetIL-15 during the manufacturing of the CAR-expressing cell, e.g., ex vivo.

[1037] In one embodiment the CAR-expressing cell described herein is contacted with a composition comprising hetIL-15 during ex vivo expansion. In an embodiment, the CAR-expressing cell described herein is contacted with a composition comprising an IL-15 polypeptide during ex vivo expansion. In an embodiment, the CAR-expressing cell described herein is contacted with a composition comprising both an IL-15 polypeptide and an IL-15Ra polypeptide during ex vivo expansion. In one embodiment the contacting results in the survival and proliferation of a lymphocyte subpopulation, e.g., CD8+ T cells.

[1038] T cells that have been exposed to varied stimulation times may exhibit different characteristics. For example, typical blood or apheresed peripheral blood mononuclear cell products have a helper T cell population (TH, CD4+) that is greater than the cytotoxic or suppressor T cell population (TC, CD8+). Ex vivo expansion of T cells by stimulating CD3 and CD28 receptors produces a population of T cells that prior to about days 8-9 consists predominately of TH cells, while after about days 8-9, the population of T cells comprises an increasingly greater population of TC cells. Accordingly, depending on the purpose of treatment, infusing a subject with a T cell population comprising predominately of TH cells may be advantageous. Similarly, if an antigen-specific subset of TC cells has been isolated it may be beneficial to expand this subset to a greater degree.

[1039] Further, in addition to CD4 and CD8 markers, other phenotypic markers vary significantly, but in large part, reproducibly during the course of the cell expansion process. Thus, such reproducibility enables the ability to tailor an activated T cell product for specific purposes.

[1040] Once a CAR described herein is constructed, various assays can be used to evaluate the activity of the molecule, such as but not limited to, the ability to expand T cells following antigen stimulation, sustain T cell expansion in the absence of re-stimulation, and anti-cancer activities in appropriate in vitro and animal models. Assays to evaluate the effects of a CAR of the present invention are described in further detail below.

[1041] Western blot analysis of CAR expression in primary T cells can be used to detect the presence of monomers and dimers. See, e.g., Milone et al., Molecular Therapy 17(8): 1453-1464 (2009). Very briefly, T cells (1:1 mixture of CD4⁺ and CD8⁺ T cells) expressing the CARs are expanded in vitro for more than 10 days followed by lysis and SDS-PAGE under reducing conditions. CARs containing the full length TCR-ζ, cytoplasmic domain and the endogenous TCR-ζ, chain are detected by western blotting using an antibody to the TCR-ζ, chain. The same T cell subsets are used for SDS-PAGE analysis under non-reducing conditions to permit evaluation of covalent dimer formation.

[1042] In vitro expansion of CAR⁺ T cells following antigen stimulation can be measured by flow cytometry. For example, a mixture of CD4⁺ and CD8⁺ T cells are stimulated with αCD3/αCD28 aAPCs followed by transduction with lentiviral vectors expressing GFP under the control of the promoters to be analyzed. Exemplary promoters include the CMV IE gene, EF-1α, ubiquitin C, or phosphoglycerokinase (PGK) promoters. GFP fluorescence is evaluated on day 6 of culture in the CD4⁺ and/or CD8⁺ T cell subsets by flow cytometry. See, e.g., Milone et al., Molecular Therapy 17(8): 1453-1464 (2009). Alternatively, a mixture of CD4⁺ and CD8⁺ T cells are stimulated with αCD3/αCD28 coated magnetic beads on day 0, and transduced with CAR on day 1 using a bicistronic lentiviral vector expressing CAR along with eGFP using a 2A ribosomal skipping sequence. Cultures are re-stimulated with either a cancer associated antigen as described herein⁺ K562 cells (K562 expressing a cancer associated antigen as described herein), wild-type K562 cells (K562 wild type) or K562 cells expressing hCD32 and 4-1BBL in the presence of antiCD3 and anti-CD28 antibody (K562-BBL-3/28) following washing. Exogenous IL-2 is added to the cultures every other day at 100 GFP⁺ T cells are enumerated by flow cytometry using bead-based counting. See, e.g., Milone et al., Molecular Therapy 17(8): 1453-1464 (2009).

[1043] Sustained CAR⁺ T cell expansion in the absence of re-stimulation can also be measured. See, e.g., Milone et al., Molecular Therapy 17(8): 1453-1464 (2009). Briefly, mean T cell volume (fl) is measured on day 8 of culture using a Coulter Multisizer III particle counter, a Nexcelom Cellometer Vision or Millipore Scepter, following stimulation with αCD3/αCD28 coated magnetic beads on day 0, and transduction with the indicated CAR on day 1.

[1044] Animal models can also be used to measure a CART activity. For example, xenograft model using human a cancer associated antigen described herein-specific CAR⁺ T cells to treat a primary human pre-B ALL in immunodeficient mice can be used. See, e.g., Milone et al., Molecular Therapy 17(8): 1453-1464 (2009). Very briefly, after establishment of ALL, mice are randomized as to treatment groups. Different numbers of a cancer associated antigen-specific CARengineered T cells are coinjected at a 1:1 ratio into NOD-SCID-γ^{-/-} mice bearing B-ALL. The number of copies of a cancer associated antigen-specific CAR vector in spleen DNA from mice is evaluated at various times following T cell injection. Animals are assessed for leukemia at weekly intervals. Peripheral blood a cancer associate antigen as described herein⁺ B-ALL blast cell counts are measured in mice that are injected with a cancer associated antigen described herein-CAR⁺ T cells or mock-transduced T cells. Survival curves for the groups are compared using the log-rank test. In addition, absolute peripheral blood CD4⁺ and CD8⁺ T cell counts 4 weeks following T cell injection in NOD-SCID-γ^{-/-} mice can also be analyzed. Mice are injected with leukemic cells and 3 weeks later are injected with T cells engineered to express CAR by a bicistronic lentiviral vector that encodes the CAR linked to eGFP. T cells are normalized to 45-50% input GFP⁺ T cells by mixing with mock-transduced cells prior to injection, and confirmed by flow cytometry. Animals are assessed for leukemia at 1-week intervals. Survival curves for the CAR⁺ T cell groups are compared using the log-rank test.

[1045] Dose dependent CAR treatment response can be evaluated. See, e.g., Milone et al., Molecular Therapy 17(8): 1453-1464 (2009). For example, peripheral blood is obtained 35-70 days after establishing leukemia in mice injected on day 21 with CART cells, an equivalent number of mock-transduced T cells, or no T cells. Mice from each group are randomly bled for determination of peripheral blood a cancer associate antigen as described herein⁺ ALL blast counts and then killed on days 35 and 49. The remaining animals are evaluated on days 57 and 70.

[1046] Assessment of cell proliferation and cytokine production has been previously described, e.g., at Milone et al., Molecular Therapy 17(8): 1453-1464 (2009). Briefly, assessment of CAR-mediated proliferation is performed in microtiter plates by mixing washed T cells with K562 cells expressing a cancer associated antigen described herein (K19) or CD32 and CD137 (KT32-BBL) for a final T-cell:K562 ratio of 2:1. K562 cells are irradiated with gamma-radiation prior to use. Anti-CD3 (clone OKT3) and anti-CD28 (clone 9.3) monoclonal antibodies are added to cultures with KT32-BBL cells to serve as a positive control for stimulating T-cell proliferation since these signals support long-term CD8⁺ T cell expansion ex vivo. T cells are enumerated in cultures using CountBright™ fluorescent beads (Invitrogen, Carlsbad, Calif.) and flow cytometry as described by the manufacturer. CAR⁺ T cells are identified by GFP expression using T cells that are engineered with eGFP-2A linked CAR-expressing lentiviral vectors. For CAR+ T cells not expressing GFP, the CAR+ T cells are detected with biotinylated recombinant a cancer associate antigen as described herein protein and a secondary avidin-PE conjugate. CD4+ and CD8⁺ expression on T cells are also simultaneously detected with specific monoclonal antibodies (BD Biosciences). Cytokine measurements are performed on supernatants collected 24 hours following re-stimulation using the human TH1/TH2 cytokine cytometric bead array kit (BD Biosciences, San Diego, Calif.) according the manufacturer's instructions. Fluorescence is assessed using a FACScalibur flow cytometer, and data is analyzed according to the manufacturer's instructions.

[1047] Cytotoxicity can be assessed by a standard 51Cr-release assay. See, e.g., Milone et al., Molecular Therapy 17(8): 1453-1464 (2009). Briefly, target cells (K562 lines and primary pro-B-ALL cells) are loaded with 51Cr (as NaCrO4, New England Nuclear, Boston, Mass.) at 37° C. for 2 hours with frequent agitation, washed twice in complete RPMI and plated into microtiter plates. Effector T cells are mixed with target cells in the wells in complete RPMI at varying ratios of effector cell:target cell (E:T). Additional wells containing media only (spontaneous release, SR) or a 1% solution of triton-X 100 detergent (total release, TR) are also prepared. After 4 hours of incubation at 37° C., supernatant from each well is harvested. Released 51Cr is then measured using a gamma particle counter (Packard Instrument Co., Waltham, Mass.). Each condition is performed in at least triplicate, and the percentage of lysis is calculated using the formula: % Lysis=(ER−SR)/(TR−SR), where ER represents the average 51Cr released for each experimental condition.

[1048] Imaging technologies can be used to evaluate specific trafficking and proliferation of CARs in tumor-bearing animal models. Such assays have been described, for example, in Barrett et al., Human Gene Therapy 22:1575-1586 (2011). Briefly, NOD/SCID/γc^{-/-} (NSG) mice are injected IV with Nalm-6 cells followed 7 days later with T cells 4 hour after electroporation with the CAR constructs. The T cells are stably transfected with a lentiviral construct to express firefly luciferase, and mice are imaged for bioluminescence. Alternatively, therapeutic efficacy and specificity of a single injection of CAR⁺ T cells in Nalm-6 xenograft model can be measured as the following: NSG mice are injected with Nalm-6 transduced to stably express firefly luciferase, followed by a single tail-vein injection of T cells engineered to express a CAR of the present invention (e.g., transduced with nucleic acid encoding a CAR of the present invention) 7 days later. Animals are imaged at various time points post injection. For example, photon-density heat maps of firefly luciferasepositive leukemia in representative mice at day 5 (2 days before treatment) and day 8 (24 hr post CAR^{P} PBLs) can be generated.

[1049] Other assays, including those described in the Example section herein as well as those that are known in the art can also be used to evaluate the CARs described herein.

### Methods of Treatment/Combination Therapies

[1050] In another aspect, the present invention provides a method comprising administering the LSD1 inhibitors of the invention in combination with a population of immune effector cells, e.g., engineered to express a CAR molecule, e.g., as described herein, as a therapy. Typically, such administration will be in the form of cells (e.g., autologous or allogeneic host cells) expressing a CAR and separate administration of the LSD1 inhibitor. Alternatively, the LSD1 inhibitor may be administered in the same composition as the cell engineered to express a CAR molecule. Alternatively, the cell engineered to express a CAR molecule may also be engineered to express an LSD1 inhibitor. In one embodiment, the subject has a disorder described herein, e.g., the subject has cancer, e.g., the subject has a cancer which expresses a target antigen described herein. In one embodiment, the subject is a human.

[1051] Methods described herein that comprise administering an LSD1 inhibitor and a CAR-expressing cell described herein may be used in combination with other known agents and therapies.

[1052] Administered “in combination”, as used herein, means that two (or more) different treatments are delivered to the subject during the course of the subject's affliction with the disorder, e.g., the two or more treatments are delivered after the subject has been diagnosed with the disorder and before the disorder has been cured or eliminated or treatment has ceased for other reasons. In some embodiments, the delivery of one treatment is still occurring when the delivery of the second begins, so that there is overlap in terms of administration. This is sometimes referred to herein as “simultaneous” or “concurrent delivery”. In other embodiments, the delivery of one treatment ends before the delivery of the other treatment begins. In some embodiments of either case, the treatment is more effective because of combined administration. For example, the second treatment is more effective, e.g., an equivalent effect is seen with less of the second treatment, or the second treatment reduces symptoms to a greater extent, than would be seen if the second treatment were administered in the absence of the first treatment, or the analogous situation is seen with the first treatment. In some embodiments, delivery is such that the reduction in a symptom, or other parameter related to the disorder is greater than what would be observed with one treatment delivered in the absence of the other. The effect of the two treatments can be partially additive, wholly additive, or greater than additive. The delivery can be such that an effect of the first treatment delivered is still detectable when the second is delivered.

[1053] A CAR-expressing cell described herein, an LSD1 inhibitor, and the at least one additional therapeutic agent can be administered simultaneously, in the same or in separate compositions, or sequentially. The three agents can be administered in any order. For example, in sequential administration, the LSD1 inhibitor and the CAR-expressing cell described herein can be administered first, and the additional agent can be administered second, or the order of administration can be reversed.

[1054] The CAR therapy and/or other therapeutic agents, procedures or modalities can be administered during periods of active disorder, or during a period of remission or less active disease. The CAR therapy can be administered before another treatment, concurrently with the treatment, post-treatment, or during remission of the disorder.

[1055] In another aspect, the invention pertains to a method of treating a subject having a disease associated with expression of a cancer associated antigen as described herein comprising administering to the subject an effective amount of a cell comprising a CAR molecule, e.g., a CAR molecule described herein.

[1056] In one aspect, the invention provides methods for treating a disease associated with expression of a cancer associated antigen as described herein. The method comprises the administration of an LSD1 inhibitor and administration of a cell, e.g., a T cell, e.g., that expresses, or can express a CAR.

[1057] In one aspect, the present invention provides methods of treating cancer by providing to the subject in need thereof an LSD1 inhibitor and immune effector cells (e.g., T cells, NK cells) that are engineered to express an XCAR, wherein X represents a tumor marker (or cancer associated antigen; as used herein, the terms XCAR and CARX are used interchangeably, e.g., a CAR19 or CARCD19 is the same as a CD19 CAR) as described herein, and wherein said cancer cells express said X tumor marker (or cancer associated antigen).

[1058] In one aspect, the present invention provides methods of treating cancer by providing to the subject in need thereof an LSD1 inhibitor and immune effector cells (e.g., T cells, NK cells) that are engineered to express a CD19CAR, wherein the cancer cells express CD19. In one embodiment, the cancer to be treated is ALL (acute lymphoblastic leukemia), CLL (chronic lymphocytic leukemia), DLBCL (diffuse large B-cell lymphoma), MCL (Mantle cell lymphoma, or MM (multiple myeloma).

[1059] In one aspect, the present invention provides methods of treating cancer by providing to the subject in need thereof an LSD1 inhibitor and immune effector cells (e.g., T cells, NK cells) that are engineered to express an EGFRvIIICAR, wherein the cancer cells express EGFRvIII. In one embodiment, the cancer to be treated is glioblastoma.

[1060] In one aspect, the present invention provides methods of treating cancer by providing to the subject in need thereof an LSD1 inhibitor and immune effector cells (e.g., T cells, NK cells) that are engineered to express a mesothelin CAR, wherein the cancer cells express mesothelin. In one embodiment, the cancer to be treated is mesothelioma, pancreatic cancer, or ovarian cancer.

[1061] In one aspect, the present invention provides methods of treating cancer by providing to the subject in need thereof an LSD1 inhibitor and immune effector cells (e.g., T cells, NK cells) that are engineered to express a CD123CAR, wherein the cancer cells express CD123. In one embodiment, the cancer to be treated is AML.

[1062] In one aspect, the present invention provides methods of treating cancer by providing to the subject in need thereof an LSD1 inhibitor and immune effector cells (e.g., T cells, NK cells) that are engineered to express a CD22CAR, wherein the cancer cells express CD22. In one embodiment, the cancer to be treated is B cell malignancies.

[1063] In one aspect, the present invention provides methods of treating cancer by providing to the subject in need thereof an LSD1 inhibitor and immune effector cells (e.g., T cells, NK cells) that are engineered to express a CS-1CAR, wherein the cancer cells express CS-1. In one embodiment, the cancer to be treated is multiple myeloma.

[1064] In one aspect, the present invention provides methods of treating cancer by providing to the subject in need thereof an LSD1 inhibitor and immune effector cells (e.g., T cells, NK cells) that are engineered to express a CLL-1CAR, wherein the cancer cells express CLL-1. In one embodiment, the cancer to be treated is AML.

[1065] In one aspect, the present invention provides methods of treating cancer by providing to the subject in need thereof an LSD1 inhibitor and immune effector cells (e.g., T cells, NK cells) that are engineered to express a CD33CAR, wherein the cancer cells express CD33. In one embodiment, the cancer to be treated is AML.

[1066] In one aspect, the present invention provides methods of treating cancer by providing to the subject in need thereof an LSD1 inhibitor and immune effector cells (e.g., T cells, NK cells) that are engineered to express a GD2CAR, wherein the cancer cells express GD2. In one embodiment, the cancer to be treated is neuroblastoma.

[1067] In one aspect, the present invention provides methods of treating cancer by providing to the subject in need thereof an LSD1 inhibitor and immune effector cells (e.g., T cells, NK cells) that are engineered to express a BCMACAR, wherein the cancer cells express BCMA. In one embodiment, the cancer to be treated is multiple myeloma.

[1068] In one aspect, the present invention provides methods of treating cancer by providing to the subject in need thereof an LSD1 inhibitor and immune effector cells (e.g., T cells, NK cells) that are engineered to express a TnCAR, wherein the cancer cells express Tn antigen. In one embodiment, the cancer to be treated is ovarian cancer.

[1069] In one aspect, the present invention provides methods of treating cancer by providing to the subject in need thereof an LSD1 inhibitor and immune effector cells (e.g., T cells, NK cells) that are engineered to express a PSMACAR, wherein the cancer cells express PSMA. In one embodiment, the cancer to be treated is prostate cancer.

[1070] In one aspect, the present invention provides methods of treating cancer by providing to the subject in need thereof an LSD1 inhibitor and immune effector cells (e.g., T cells, NK cells) that are engineered to express a ROR1CAR, wherein the cancer cells express ROR1. In one embodiment, the cancer to be treated is B cell malignancies.

[1071] In one aspect, the present invention provides methods of treating cancer by providing to the subject in need thereof an LSD1 inhibitor and immune effector cells (e.g., T cells, NK cells) that are engineered to express a FLT3 CAR, wherein the cancer cells express FLT3. In one embodiment, the cancer to be treated is AML.

[1072] In one aspect, the present invention provides methods of treating cancer by providing to the subject in need thereof an LSD1 inhibitor and f immune effector cells (e.g., T cells, NK cells) that are engineered to express a TAG72CAR, wherein the cancer cells express TAG72. In one embodiment, the cancer to be treated is gastrointestinal cancer.

[1073] In one aspect, the present invention provides methods of treating cancer by providing to the subject in need thereof an LSD1 inhibitor and immune effector cells (e.g., T cells, NK cells) that are engineered to express a CD38CAR, wherein the cancer cells express CD38. In one embodiment, the cancer to be treated is multiple myeloma.

[1074] In one aspect, the present invention provides methods of treating cancer by providing to the subject in need thereof an LSD1 inhibitor and immune effector cells (e.g., T cells, NK cells) that are engineered to express a CD44v6CAR, wherein the cancer cells express CD44v6. In one embodiment, the cancer to be treated is cervical cancer, AML, or MM.

[1075] In one aspect, the present invention provides methods of treating cancer by providing to the subject in need thereof an LSD1 inhibitor and immune effector cells (e.g., T cells, NK cells) that are engineered to express a CEACAR, wherein the cancer cells express CEA. In one embodiment, the cancer to be treated is pastrointestinal cancer, or pancreatic cancer.

[1076] In one aspect, the present invention provides methods of treating cancer by providing to the subject in need thereof an LSD1 inhibitor and immune effector cells (e.g., T cells, NK cells) that are engineered to express a EPCAMCAR, wherein the cancer cells express EPCAM. In one embodiment, the cancer to be treated is gastrointestinal cancer.

[1077] In one aspect, the present invention provides methods of treating cancer by providing to the subject in need thereof an LSD1 inhibitor and immune effector cells (e.g., T cells, NK cells) that are engineered to express a B7H3CAR, wherein the cancer cells express B7H3.

[1078] In one aspect, the present invention provides methods of treating cancer by providing to the subject in need thereof an LSD1 inhibitor and immune effector cells (e.g., T cells, NK cells) that are engineered to express a KITCAR, wherein the cancer cells express KIT. In one embodiment, the cancer to be treated is gastrointestinal cancer.

[1079] In one aspect, the present invention provides methods of treating cancer by providing to the subject in need thereof an LSD1 inhibitor and immune effector cells (e.g., T cells, NK cells) that are engineered to express a IL-13Ra2CAR, wherein the cancer cells express IL-13Ra2. In one embodiment, the cancer to be treated is glioblastoma.

[1080] In one aspect, the present invention provides methods of treating cancer by providing to the subject in need thereof an LSD1 inhibitor and immune effector cells (e.g., T cells, NK cells) that are engineered to express a CD30CAR, wherein the cancer cells express CD30. In one embodiment, the cancer to be treated is lymphomas, or leukemias.

[1081] In one aspect, the present invention provides methods of treating cancer by providing to the subject in need thereof an LSD1 inhibitor and immune effector cells (e.g., T cells, NK cells) that are engineered to express a GD3CAR, wherein the cancer cells express GD3. In one embodiment, the cancer to be treated is melanoma.

[1082] In one aspect, the present invention provides methods of treating cancer by providing to the subject in need thereof an LSD1 inhibitor and immune effector cells (e.g., T cells, NK cells) that are engineered to express a CD171CAR, wherein the cancer cells express CD171. In one embodiment, the cancer to be treated is neuroblastoma, ovarian cancer, melanoma, breast cancer, pancreatic cancer, colon cancers, or NSCLC (non-small cell lung cancer).

[1083] In one aspect, the present invention provides methods of treating cancer by providing to the subject in need thereof an LSD1 inhibitor and immune effector cells (e.g., T cells, NK cells) that are engineered to express a IL-11RaCAR, wherein the cancer cells express IL-11Ra. In one embodiment, the cancer to be treated is osteosarcoma.

[1084] In one aspect, the present invention provides methods of treating cancer by providing to the subject in need thereof an LSD1 inhibitor and immune effector cells (e.g., T cells, NK cells) that are engineered to express a PSCACAR, wherein the cancer cells express PSCA. In one embodiment, the cancer to be treated is prostate cancer.

[1085] In one aspect, the present invention provides methods of treating cancer by providing to the subject in need thereof an LSD1 inhibitor and immune effector cells (e.g., T cells, NK cells) that are engineered to express a VEGFR2CAR, wherein the cancer cells express VEGFR2. In one embodiment, the cancer to be treated is a solid tumor.

[1086] In one aspect, the present invention provides methods of treating cancer by providing to the subject in need thereof an LSD1 inhibitor and immune effector cells (e.g., T cells, NK cells) that are engineered to express a LewisYCAR, wherein the cancer cells express LewisY. In one embodiment, the cancer to be treated is ovarian cancer, or AML.

[1087] In one aspect, the present invention provides methods of treating cancer by providing to the subject in need thereof an LSD1 inhibitor and immune effector cells (e.g., T cells, NK cells) that are engineered to express a CD24CAR, wherein the cancer cells express CD24. In one embodiment, the cancer to be treated is pancreatic cancer.

[1088] In one aspect, the present invention provides methods of treating cancer by providing to the subject in need thereof an LSD1 inhibitor and immune effector cells (e.g., T cells, NK cells) that are engineered to express a PDGFR-betaCAR, wherein the cancer cells express PDGFR-beta. In one embodiment, the cancer to be treated is breast cancer, prostate cancer, GIST (gastrointestinal stromal tumor), CML, DFSP (dermatofibrosarcoma protuberans), or glioma.

[1089] In one aspect, the present invention provides methods of treating cancer by providing to the subject in need thereof an LSD1 inhibitor and immune effector cells (e.g., T cells, NK cells) that are engineered to express a SSEA-4CAR, wherein the cancer cells express SSEA-4. In one embodiment, the cancer to be treated is glioblastoma, breast cancer, lung cancer, or stem cell cancer.

[1090] In one aspect, the present invention provides methods of treating cancer by providing to the subject in need thereof an LSD1 inhibitor and immune effector cells (e.g., T cells, NK cells) that are engineered to express a CD20CAR, wherein the cancer cells express CD20. In one embodiment, the cancer to be treated is B cell malignancies.

[1091] In one aspect, the present invention provides methods of treating cancer by providing to the subject in need thereof an LSD1 inhibitor and immune effector cells (e.g., T cells, NK cells) that are engineered to express a Folate receptor alphaCAR, wherein the cancer cells express folate receptor alpha. In one embodiment, the cancer to be treated is ovarian cancer, NSCLC, endometrial cancer, renal cancer, or other solid tumors.

[1092] In one aspect, the present invention provides methods of treating cancer by providing to the subject in need thereof an LSD1 inhibitor and immune effector cells (e.g., T cells, NK cells) that are engineered to express an ERBB2CAR, wherein the cancer cells express ERBB2 (Her2/neu). In one embodiment, the cancer to be treated is breast cancer, gastric cancer, colorectal cancer, lung cancer, or other solid tumors.

[1093] In one aspect, the present invention provides methods of treating cancer by providing to the subject in need thereof an LSD1 inhibitor and immune effector cells (e.g., T cells, NK cells) that are engineered to express a MUC1CAR, wherein the cancer cells express MUC1. In one embodiment, the cancer to be treated is breast cancer, lung cancer, or other solid tumors.

[1094] In one aspect, the present invention provides methods of treating cancer by providing to the subject in need thereof an LSD1 inhibitor and immune effector cells (e.g., T cells, NK cells) that are engineered to express a EGFRCAR, wherein the cancer cells express EGFR. In one embodiment, the cancer to be treated is glioblastoma, SCLC (small cell lung cancer), SCCHN (squamous cell carcinoma of the head and neck), NSCLC, or other solid tumors.

[1095] In one aspect, the present invention provides methods of treating cancer by providing to the subject in need thereof an LSD1 inhibitor and immune effector cells (e.g., T cells, NK cells) that are engineered to express a NCAMCAR, wherein the cancer cells express NCAM. In one embodiment, the cancer to be treated is neuroblastoma, or other solid tumors.

[1096] In one aspect, the present invention provides methods of treating cancer by providing to the subject in need thereof an LSD1 inhibitor and immune effector cells (e.g., T cells, NK cells) that are engineered to express a CAIXCAR, wherein the cancer cells express CAIX. In one embodiment, the cancer to be treated is renal cancer, CRC, cervical cancer, or other solid tumors.

[1097] In one aspect, the present invention provides methods of treating cancer by providing to the subject in need thereof an LSD1 inhibitor and immune effector cells (e.g., T cells, NK cells) that are engineered to express an EphA2CAR, wherein the cancer cells express EphA2. In one embodiment, the cancer to be treated is GBM.

[1098] In one aspect, the present invention provides methods of treating cancer by providing to the subject in need thereof an LSD1 inhibitor and immune effector cells (e.g., T cells, NK cells) that are engineered to express a GD3CAR, wherein the cancer cells express GD3. In one embodiment, the cancer to be treated is melanoma.

[1099] In one aspect, the present invention provides methods of treating cancer by providing to the subject in need thereof an LSD1 inhibitor and immune effector cells (e.g., T cells, NK cells) that are engineered to express a Fucosyl GM1CAR, wherein the cancer cells express Fucosyl GM

[1100] In one aspect, the present invention provides methods of treating cancer by providing to the subject in need thereof an LSD1 inhibitor and immune effector cells (e.g., T cells, NK cells) that are engineered to express a sLeCAR, wherein the cancer cells express sLe. In one embodiment, the cancer to be treated is NSCLC, or AML.

[1101] In one aspect, the present invention provides methods of treating cancer by providing to the subject in need thereof an LSD1 inhibitor and immune effector cells (e.g., T cells, NK cells) that are engineered to express a GM3CAR, wherein the cancer cells express GM3.

[1102] In one aspect, the present invention provides methods of treating cancer by providing to the subject in need thereof an LSD1 inhibitor and immune effector cells (e.g., T cells, NK cells) that are engineered to express a TGS5CAR, wherein the cancer cells express TGS5.

[1103] In one aspect, the present invention provides methods of treating cancer by providing to the subject in need thereof an LSD1 inhibitor and immune effector cells (e.g., T cells, NK cells) that are engineered to express a HMWMAACAR, wherein the cancer cells express HMWMAA. In one embodiment, the cancer to be treated is melanoma, glioblastoma, or breast cancer.

[1104] In one aspect, the present invention provides methods of treating cancer by providing to the subject in need thereof an LSD1 inhibitor and immune effector cells (e.g., T cells, NK cells) that are engineered to express an o-acetyl-GD2CAR, wherein the cancer cells express o-acetyl-GD2. In one embodiment, the cancer to be treated is neuroblastoma, or melanoma.

[1105] In one aspect, the present invention provides methods of treating cancer by providing to the subject in need thereof an LSD1 inhibitor and immune effector cells (e.g., T cells, NK cells) that are engineered to express a Folate receptor betaCAR, wherein the cancer cells express CD19. In one embodiment, the cancer to be treated is AML, or myeloma.

[1106] In one aspect, the present invention provides methods of treating cancer by providing to the subject in need thereof an LSD1 inhibitor and immune effector cells (e.g., T cells, NK cells) that are engineered to express a TEM1/CD248CAR, wherein the cancer cells express TEM1/CD248. In one embodiment, the cancer to be treated is a solid tumor.

[1107] In one aspect, the present invention provides methods of treating cancer by providing to the subject in need thereof an LSD1 inhibitor and immune effector cells (e.g., T cells, NK cells) that are engineered to express a TEM7RCAR, wherein the cancer cells express TEM7R. In one embodiment, the cancer to be treated is solid tumor.

[1108] In one aspect, the present invention provides methods of treating cancer by providing to the subject in need thereof an LSD1 inhibitor and immune effector cells (e.g., T cells, NK cells) that are engineered to express a CLDN6CAR, wherein the cancer cells express CLDN6. In one embodiment, the cancer to be treated is ovarian cancer, lung cancer, or breast cancer.

[1109] In one aspect, the present invention provides methods of treating cancer by providing to the subject in need thereof an LSD1 inhibitor and immune effector cells (e.g., T cells, NK cells) that are engineered to express a TSHRCAR, wherein the cancer cells express TSHR. In one embodiment, the cancer to be treated is thyroid cancer, or multiple myeloma.

[1110] In one aspect, the present invention provides methods of treating cancer by providing to the subject in need thereof an LSD1 inhibitor and immune effector cells (e.g., T cells, NK cells) that are engineered to express a GPRC5DCAR, wherein the cancer cells express GPRC5D. In one embodiment, the cancer to be treated is multiple myeloma.

[1111] In one aspect, the present invention provides methods of treating cancer by providing to the subject in need thereof an LSD1 inhibitor and immune effector cells (e.g., T cells, NK cells) that are engineered to express a CXORF61CAR, wherein the cancer cells express CXORF61.

[1112] In one aspect, the present invention provides methods of treating cancer by providing to the subject in need thereof an LSD1 inhibitor and immune effector cells (e.g., T cells, NK cells) that are engineered to express a CD97CAR, wherein the cancer cells express CD97. In one embodiment, the cancer to be treated is B cell malignancies, gastric cancer, pancreatic cancer, esophageal cancer, glioblastoma, breast cancer, or colorectal cancer.

[1113] In one aspect, the present invention provides methods of treating cancer by providing to the subject in need thereof an LSD1 inhibitor and immune effector cells (e.g., T cells, NK cells) that are engineered to express a CD179aCAR, wherein the cancer cells express CD179a. In one embodiment, the cancer to be treated is B cell malignancies.

[1114] In one aspect, the present invention provides methods of treating cancer by providing to the subject in need thereof an LSD1 inhibitor and immune effector cells (e.g., T cells, NK cells) that are engineered to express an ALK CAR, wherein the cancer cells express ALK. In one embodiment, the cancer to be treated is NSCLC, ALCL (anaplastic large cell lymphoma), IMT (inflammatory myofibroblastic tumor), or neuroblastoma.

[1115] In one aspect, the present invention provides methods of treating cancer by providing to the subject in need thereof an LSD1 inhibitor and immune effector cells (e.g., T cells, NK cells) that are engineered to express a Plysialic acid CAR, wherein the cancer cells express Plysialic acid. In one embodiment, the cancer to be treated is small cell lung cancer.

[1116] In one aspect, the present invention provides methods of treating cancer by providing to the subject in need thereof an LSD1 inhibitor and immune effector cells (e.g., T cells, NK cells) that are engineered to express a PLAC1CAR, wherein the cancer cells express PLAC1. In one embodiment, the cancer to be treated is HCC (hepatocellular carcinoma).

[1117] In one aspect, the present invention provides methods of treating cancer by providing to the subject in need thereof an LSD1 inhibitor and immune effector cells (e.g., T cells, NK cells) that are engineered to express a GloboHCAR, wherein the cancer cells express GloboH. In one embodiment, the cancer to be treated is ovarian cancer, gastric cancer, prostate cancer, lung cancer, breast cancer, or pancreatic cancer.

[1118] In one aspect, the present invention provides methods of treating cancer by providing to the subject in need thereof an LSD1 inhibitor and immune effector cells (e.g., T cells, NK cells) that are engineered to express a NY-BR-1CAR, wherein the cancer cells express NY-BR-1. In one embodiment, the cancer to be treated is breast cancer.

[1119] In one aspect, the present invention provides methods of treating cancer by providing to the subject in need thereof an LSD1 inhibitor and immune effector cells (e.g., T cells, NK cells) that are engineered to express a UPK2CAR, wherein the cancer cells express UPK2. In one embodiment, the cancer to be treated is bladder cancer.

[1120] In one aspect, the present invention provides methods of treating cancer by providing to the subject in need thereof an LSD1 inhibitor and immune effector cells (e.g., T cells, NK cells) that are engineered to express a HAVCR1CAR, wherein the cancer cells express HAVCR1. In one embodiment, the cancer to be treated is renal cancer.

[1121] In one aspect, the present invention provides methods of treating cancer by providing to the subject in need thereof an LSD1 inhibitor and immune effector cells (e.g., T cells, NK cells) that are engineered to express a ADRB3CAR, wherein the cancer cells express ADRB3. In one embodiment, the cancer to be treated is Ewing sarcoma.

[1122] In one aspect, the present invention provides methods of treating cancer by providing to the subject in need thereof an LSD1 inhibitor and immune effector cells (e.g., T cells, NK cells) that are engineered to express a PANX3CAR, wherein the cancer cells express PANX3. In one embodiment, the cancer to be treated is osteosarcoma.

[1123] In one aspect, the present invention provides methods of treating cancer by providing to the subject in need thereof an LSD1 inhibitor and immune effector cells (e.g., T cells, NK cells) that are engineered to express a GPR20CAR, wherein the cancer cells express GPR20. In one embodiment, the cancer to be treated is GIST.

[1124] In one aspect, the present invention provides methods of treating cancer by providing to the subject in need thereof an LSD1 inhibitor and immune effector cells (e.g., T cells, NK cells) that are engineered to express a LY6KCAR, wherein the cancer cells express LY6K. In one embodiment, the cancer to be treated is breast cancer, lung cancer, ovary cancer, or cervix cancer.

[1125] In one aspect, the present invention provides methods of treating cancer by providing to the subject in need thereof an LSD1 inhibitor and immune effector cells (e.g., T cells, NK cells) that are engineered to express a OR51E2CAR, wherein the cancer cells express OR51E2. In one embodiment, the cancer to be treated is prostate cancer.

[1126] In one aspect, the present invention provides methods of treating cancer by providing to the subject in need thereof an LSD1 inhibitor and immune effector cells (e.g., T cells, NK cells) that are engineered to express a TARPCAR, wherein the cancer cells express TARP. In one embodiment, the cancer to be treated is prostate cancer.

[1127] In one aspect, the present invention provides methods of treating cancer by providing to the subject in need thereof an LSD1 inhibitor and immune effector cells (e.g., T cells, NK cells) that are engineered to express a WT1CAR, wherein the cancer cells express WT1.

[1128] In one aspect, the present invention provides methods of treating cancer by providing to the subject in need thereof an LSD1 inhibitor and immune effector cells (e.g., T cells, NK cells) that are engineered to express a NY-ESO-1CAR, wherein the cancer cells express NY-ESO-1.

[1129] In one aspect, the present invention provides methods of treating cancer by providing to the subject in need thereof an LSD1 inhibitor and immune effector cells (e.g., T cells, NK cells) that are engineered to express a LAGE-1a CAR, wherein the cancer cells express LAGE-1a.

[1130] In one aspect, the present invention provides methods of treating cancer by providing to the subject in need thereof an LSD1 inhibitor and immune effector cells (e.g., T cells, NK cells) that are engineered to express a MAGE-A1CAR, wherein the cancer cells express MAGE-A1. In one embodiment, the cancer to be treated is melanoma.

[1131] In one aspect, the present invention provides methods of treating cancer by providing to the subject in need thereof an LSD1 inhibitor and immune effector cells (e.g., T cells, NK cells) that are engineered to express a MAGE A1CAR, wherein the cancer cells express MAGE A1.

[1132] In one aspect, the present invention provides methods of treating cancer by providing to the subject in need thereof an LSD1 inhibitor and immune effector cells (e.g., T cells, NK cells) that are engineered to express a ETV6-AML CAR, wherein the cancer cells express ETV6-AML.

[1133] In one aspect, the present invention provides methods of treating cancer by providing to the subject in need thereof an LSD1 inhibitor and immune effector cells (e.g., T cells, NK cells) that are engineered to express a sperm protein 17 CAR, wherein the cancer cells express sperm protein 17. In one embodiment, the cancer to be treated is ovarian cancer, HCC, or NSCLC.

[1134] In one aspect, the present invention provides methods of treating cancer by providing to the subject in need thereof an LSD1 inhibitor and immune effector cells (e.g., T cells, NK cells) that are engineered to express a XAGE1CAR, wherein the cancer cells express XAGE1. In one embodiment, the cancer to be treated is Ewings, or rhabdo cancer.

[1135] In one aspect, the present invention provides methods of treating cancer by providing to the subject in need thereof an LSD1 inhibitor and immune effector cells (e.g., T cells, NK cells) that are engineered to express a Tie 2 CAR, wherein the cancer cells express Tie 2. In one embodiment, the cancer to be treated is a solid tumor.

[1136] In one aspect, the present invention provides methods of treating cancer by providing to the subject in need thereof an LSD1 inhibitor and immune effector cells (e.g., T cells, NK cells) that are engineered to express a MAD-CT-1CAR, wherein the cancer cells express MAD-CT-1. In one embodiment, the cancer to be treated is prostate cancer, or melanoma.

[1137] In one aspect, the present invention provides methods of treating cancer by providing to the subject in need thereof an LSD1 inhibitor and immune effector cells (e.g., T cells, NK cells) that are engineered to express a MAD-CT-2CAR, wherein the cancer cells express MAD-CT-2. In one embodiment, the cancer to be treated is prostate cancer, melanoma.

[1138] In one aspect, the present invention provides methods of treating cancer by providing to the subject in need thereof an LSD1 inhibitor and immune effector cells (e.g., T cells, NK cells) that are engineered to express a Fos-related antigen 1 CAR, wherein the cancer cells express Fos-related antigen 1. In one embodiment, the cancer to be treated is glioma, squamous cell cancer, or pancreatic cancer.

[1139] In one aspect, the present invention provides methods of treating cancer by providing to the subject in need thereof an LSD1 inhibitor and immune effector cells (e.g., T cells, NK cells) that are engineered to express a p53CAR, wherein the cancer cells express p53.

[1140] In one aspect, the present invention provides methods of treating cancer by providing to the subject in need thereof an LSD1 inhibitor and immune effector cells (e.g., T cells, NK cells) that are engineered to express a prostein CAR, wherein the cancer cells express prostein.

[1141] In one aspect, the present invention provides methods of treating cancer by providing to the subject in need thereof an LSD1 inhibitor and immune effector cells (e.g., T cells, NK cells) that are engineered to express a survivin and telomerase CAR, wherein the cancer cells express survivin and telomerase.

[1142] In one aspect, the present invention provides methods of treating cancer by providing to the subject in need thereof an LSD1 inhibitor and immune effector cells (e.g., T cells, NK cells) that are engineered to express a PCTA-1/Galectin 8 CAR, wherein the cancer cells express PCTA-1/Galectin 8.

[1143] In one aspect, the present invention provides methods of treating cancer by providing to the subject in need thereof an LSD1 inhibitor and immune effector cells (e.g., T cells, NK cells) that are engineered to express a MelanA/MART1CAR, wherein the cancer cells express MelanA/MART1.

[1144] In one aspect, the present invention provides methods of treating cancer by providing to the subject in need thereof an LSD1 inhibitor and immune effector cells (e.g., T cells, NK cells) that are engineered to express a Ras mutant CAR, wherein the cancer cells express Ras mutant.

[1145] In one aspect, the present invention provides methods of treating cancer by providing to the subject in need thereof an LSD1 inhibitor and immune effector cells (e.g., T cells, NK cells) that are engineered to express a p53 mutant CAR, wherein the cancer cells express p53 mutant.

[1146] In one aspect, the present invention provides methods of treating cancer by providing to the subject in need thereof an LSD1 inhibitor and immune effector cells (e.g., T cells, NK cells) that are engineered to express a hTERT CAR, wherein the cancer cells express hTERT.

[1147] In one aspect, the present invention provides methods of treating cancer by providing to the subject in need thereof an LSD1 inhibitor and immune effector cells (e.g., T cells, NK cells) that are engineered to express a sarcoma translocation breakpoints CAR, wherein the cancer cells express sarcoma translocation breakpoints. In one embodiment, the cancer to be treated is sarcoma.

[1148] In one aspect, the present invention provides methods of treating cancer by providing to the subject in need thereof an LSD1 inhibitor and immune effector cells (e.g., T cells, NK cells) that are engineered to express a ML-IAP CAR, wherein the cancer cells express ML-IAP. In one embodiment, the cancer to be treated is melanoma.

[1149] In one aspect, the present invention provides methods of treating cancer by providing to the subject in need thereof an LSD1 inhibitor and immune effector cells (e.g., T cells, NK cells) that are engineered to express a ERGCAR, wherein the cancer cells express ERG (TMPRSS2 ETS fusion gene).

[1150] In one aspect, the present invention provides methods of treating cancer by providing to the subject in need thereof an LSD1 inhibitor and immune effector cells (e.g., T cells, NK cells) that are engineered to express a NA17CAR, wherein the cancer cells express NA17. In one embodiment, the cancer to be treated is melanoma.

[1151] In one aspect, the present invention provides methods of treating cancer by providing to the subject in need thereof an LSD1 inhibitor and immune effector cells (e.g., T cells, NK cells) that are engineered to express a PAX3CAR, wherein the cancer cells express PAX3. In one embodiment, the cancer to be treated is alveolar rhabdomyosarcoma.

[1152] In one aspect, the present invention provides methods of treating cancer by providing to the subject in need thereof an LSD1 inhibitor and immune effector cells (e.g., T cells, NK cells) that are engineered to express an androgen receptor CAR, wherein the cancer cells express androgen receptor. In one embodiment, the cancer to be treated is metastatic prostate cancer.

[1153] In one aspect, the present invention provides methods of treating cancer by providing to the subject in need thereof an LSD1 inhibitor and immune effector cells (e.g., T cells, NK cells) that are engineered to express a Cyclin B1CAR, wherein the cancer cells express Cyclin B1.

[1154] In one aspect, the present invention provides methods of treating cancer by providing to the subject in need thereof an LSD1 inhibitor and immune effector cells (e.g., T cells, NK cells) that are engineered to express a MYCNCAR, wherein the cancer cells express MYCN.

[1155] In one aspect, the present invention provides methods of treating cancer by providing to the subject in need thereof an LSD1 inhibitor and immune effector cells (e.g., T cells, NK cells) that are engineered to express a RhoC CAR, wherein the cancer cells express RhoC.

[1156] In one aspect, the present invention provides methods of treating cancer by providing to the subject in need thereof an LSD1 inhibitor and immune effector cells (e.g., T cells, NK cells) that are engineered to express a TRP-2CAR, wherein the cancer cells express TRP-2. In one embodiment, the cancer to be treated is melanoma.

[1157] In one aspect, the present invention provides methods of treating cancer by providing to the subject in need thereof an LSD1 inhibitor and immune effector cells (e.g., T cells, NK cells) that are engineered to express a CYP1B1CAR, wherein the cancer cells express CYP1B1. In one embodiment, the cancer to be treated is breast cancer, colon cancer, lung cancer, esophagus cancer, skin cancer, lymph node cancer, brain cancer, or testis cancer.

[1158] In one aspect, the present invention provides methods of treating cancer by providing to the subject in need thereof an LSD1 inhibitor and immune effector cells (e.g., T cells, NK cells) that are engineered to express a BORIS CAR, wherein the cancer cells express BORIS. In one embodiment, the cancer to be treated is lung cancer.

[1159] In one aspect, the present invention provides methods of treating cancer by providing to the subject in need thereof an LSD1 inhibitor and immune effector cells (e.g., T cells, NK cells) that are engineered to express a SART3CAR, wherein the cancer cells express SART3

[1160] In one aspect, the present invention provides methods of treating cancer by providing to the subject in need thereof an LSD1 inhibitor and immune effector cells (e.g., T cells, NK cells) that are engineered to express a PAX5CAR, wherein the cancer cells express PAX5.

[1161] In one aspect, the present invention provides methods of treating cancer by providing to the subject in need thereof an LSD1 inhibitor and immune effector cells (e.g., T cells, NK cells) that are engineered to express a OY-TES1CAR, wherein the cancer cells express OY-TES1.

[1162] In one aspect, the present invention provides methods of treating cancer by providing to the subject in need thereof an LSD1 inhibitor and immune effector cells (e.g., T cells, NK cells) that are engineered to express a LCK CAR, wherein the cancer cells express LCK.

[1163] In one aspect, the present invention provides methods of treating cancer by providing to the subject in need thereof an LSD1 inhibitor and immune effector cells (e.g., T cells, NK cells) that are engineered to express a AKAP-4CAR, wherein the cancer cells express AKAP-4.

[1164] In one aspect, the present invention provides methods of treating cancer by providing to the subject in need thereof an LSD1 inhibitor and immune effector cells (e.g., T cells, NK cells) that are engineered to express a SSX2CAR, wherein the cancer cells express SSX2.

[1165] In one aspect, the present invention provides methods of treating cancer by providing to the subject in need thereof an LSD1 inhibitor and immune effector cells (e.g., T cells, NK cells) that are engineered to express a RAGE-1CAR, wherein the cancer cells express RAGE-1. In one embodiment, the cancer to be treated is RCC (renal cell cancer), or other solid tumors

[1166] In one aspect, the present invention provides methods of treating cancer by providing to the subject in need thereof an LSD1 inhibitor and immune effector cells (e.g., T cells, NK cells) that are engineered to express a human telomerase reverse transcriptaseCAR, wherein the cancer cells express human telomerase reverse transcriptase. In one embodiment, the cancer to be treated is solid tumors.

[1167] In one aspect, the present invention provides methods of treating cancer by providing to the subject in need thereof an LSD1 inhibitor and immune effector cells (e.g., T cells, NK cells) that are engineered to express a RU1CAR, wherein the cancer cells express RU1.

[1168] In one aspect, the present invention provides methods of treating cancer by providing to the subject in need thereof an LSD1 inhibitor and immune effector cells (e.g., T cells, NK cells) that are engineered to express a RU2CAR, wherein the cancer cells express RU2.

[1169] In one aspect, the present invention provides methods of treating cancer by providing to the subject in need thereof an LSD1 inhibitor and immune effector cells (e.g., T cells, NK cells) that are engineered to express an intestinal carboxyl esteraseCAR, wherein the cancer cells express intestinal carboxyl esterase. In one embodiment, the cancer to be treated is thyroid cancer, RCC, CRC (colorectal cancer), breast cancer, or other solid tumors.

[1170] In one aspect, the present invention provides methods of treating cancer by providing to the subject in need thereof an LSD1 inhibitor and immune effector cells (e.g., T cells, NK cells) that are engineered to express a Prostase CAR, wherein the cancer cells express Prostase.

[1171] In one aspect, the present invention provides methods of treating cancer by providing to the subject in need thereof an LSD1 inhibitor and immune effector cells (e.g., T cells, NK cells) that are engineered to express a PAPCAR, wherein the cancer cells express PAP.

[1172] In one aspect, the present invention provides methods of treating cancer by providing to the subject in need thereof an LSD1 inhibitor and immune effector cells (e.g., T cells, NK cells) that are engineered to express an IGF-I receptor CAR, wherein the cancer cells express IGF-I receptor.

[1173] In one aspect, the present invention provides methods of treating cancer by providing to the subject in need thereof an LSD1 inhibitor and immune effector cells (e.g., T cells, NK cells) that are engineered to express a gp100 CAR, wherein the cancer cells express gp100.

[1174] In one aspect, the present invention provides methods of treating cancer by providing to the subject in need thereof an LSD1 inhibitor and immune effector cells (e.g., T cells, NK cells) that are engineered to express a bcr-abl CAR, wherein the cancer cells express bcr-abl.

[1175] In one aspect, the present invention provides methods of treating cancer by providing to the subject in need thereof an LSD1 inhibitor and immune effector cells (e.g., T cells, NK cells) that are engineered to express a tyrosinase CAR, wherein the cancer cells express tyrosinase.

[1176] In one aspect, the present invention provides methods of treating cancer by providing to the subject in need thereof immune effector cells (e.g., T cells, NK cells) that are engineered to express a Fucosyl GM1CAR, wherein the cancer cells express Fucosyl GM1.

[1177] In one aspect, the present invention provides methods of treating cancer by providing to the subject in need thereof an LSD1 inhibitor and immune effector cells (e.g., T cells, NK cells) that are engineered to express a mut hsp70-2CAR, wherein the cancer cells express mut hsp70-2. In one embodiment, the cancer to be treated is melanoma.

[1178] In one aspect, the present invention provides methods of treating cancer by providing to the subject in need thereof immune effector cells (e.g., T cells, NK cells) that are engineered to express a CD79a CAR, wherein the cancer cells express CD79a.

[1179] In one aspect, the present invention provides methods of treating cancer by providing to the subject in need thereof immune effector cells (e.g., T cells, NK cells) that are engineered to express a CD79b CAR, wherein the cancer cells express CD79b.

[1180] In one aspect, the present invention provides methods of treating cancer by providing to the subject in need thereof immune effector cells (e.g., T cells, NK cells) that are engineered to express a CD72 CAR, wherein the cancer cells express CD72.

[1181] In one aspect, the present invention provides methods of treating cancer by providing to the subject in need thereof immune effector cells (e.g., T cells, NK cells) that are engineered to express a LAIR1 CAR, wherein the cancer cells express LAIR1.

[1182] In one aspect, the present invention provides methods of treating cancer by providing to the subject in need thereof immune effector cells (e.g., T cells, NK cells) that are engineered to express a FCAR CAR, wherein the cancer cells express FCAR.

[1183] In one aspect, the present invention provides methods of treating cancer by providing to the subject in need thereof immune effector cells (e.g., T cells, NK cells) that are engineered to express a LILRA2 CAR, wherein the cancer cells express LILRA2.

[1184] In one aspect, the present invention provides methods of treating cancer by providing to the subject in need thereof immune effector cells (e.g., T cells, NK cells) that are engineered to express a CD300LF CAR, wherein the cancer cells express CD300LF.

[1185] In one aspect, the present invention provides methods of treating cancer by providing to the subject in need thereof immune effector cells (e.g., T cells, NK cells) that are engineered to express a CLEC12A CAR, wherein the cancer cells express CLEC12A.

[1186] In one aspect, the present invention provides methods of treating cancer by providing to the subject in need thereof immune effector cells (e.g., T cells, NK cells) that are engineered to express a BST2 CAR, wherein the cancer cells express BST2.

[1187] In one aspect, the present invention provides methods of treating cancer by providing to the subject in need thereof immune effector cells (e.g., T cells, NK cells) that are engineered to express an EMR2 CAR, wherein the cancer cells express EMR2.

[1188] In one aspect, the present invention provides methods of treating cancer by providing to the subject in need thereof immune effector cells (e.g., T cells, NK cells) that are engineered to express a LY75 CAR, wherein the cancer cells express LY75.

[1189] In one aspect, the present invention provides methods of treating cancer by providing to the subject in need thereof immune effector cells (e.g., T cells, NK cells) that are engineered to express a GPC3 CAR, wherein the cancer cells express GPC3.

[1190] In one aspect, the present invention provides methods of treating cancer by providing to the subject in need thereof immune effector cells (e.g., T cells, NK cells) that are engineered to express a FCRL5 CAR, wherein the cancer cells express FCRL5.

[1191] In one aspect, the present invention provides methods of treating cancer by providing to the subject in need thereof immune effector cells (e.g., T cells, NK cells) that are engineered to express an IGLL1 CAR, wherein the cancer cells express IGLL1.

[1192] In one aspect, the present invention relates to treating a subject in vivo using an LSD1 inhibitor and a PD1 CAR such that growth of cancerous tumors is inhibited. A PD1 CAR may be used alone to inhibit the growth of cancerous tumors. Alternatively, PD1 CAR may be used in conjunction with other CARs, immunogenic agents, standard cancer treatments, or other antibodies. In one embodiment, the subject is treated with a PD1 CAR and an XCAR described herein. In an embodiment, a PD1 CAR is used in conjunction with another CAR, e.g., a CAR described herein, and a kinase inhibitor, e.g., a kinase inhibitor described herein.

[1193] In another aspect, a method of treating a subject, e.g., reducing or ameliorating, a hyperproliferative condition or disorder (e.g., a cancer), e.g., a solid tumor, a soft tissue tumor, a hematological cancer, or a metastatic lesion, in a subject, is provided. In embodiments the method comprises administration of an LSD1 inhibitor and a population of immune effector cells, e.g., T cells, engineered to express a CAR.

[1194] In yet another aspect, the invention features a method of treating a subject having a disease associated with expression of a tumor antigen (e.g., an antigen described herein), comprising administering to the subject an effective amount of a cell, e.g., an immune effector cell (e.g., a population of immune effector cells) comprising a CAR molecule, wherein the CAR molecule comprises an antigen binding domain, a transmembrane domain, and an intracellular domain, said intracellular domain comprises a costimulatory domain and/or a primary signaling domain, wherein said antigen binding domain binds to the tumor antigen associated with the disease, e.g. a tumor antigen as described herein.

[1195] In a related aspect, the invention features a method of treating a subject having a disease associated with expression of a tumor antigen. The method comprises administering to the subject an effective amount of a cell, e.g., an immune effector cell (e.g., a population of immune effector cells) comprising a CAR molecule, in combination (in addition to the LSD1 inhibitor) with an agent that increases the efficacy of the immune cell, wherein:
[1196] the agent that increases the efficacy of the immune cell is chosen from one or more of:
[1197] (i) a protein phosphatase inhibitor;
[1198] (ii) a kinase inhibitor;
[1199] (iii) a cytokine;
[1200] (iv) an inhibitor of an immune inhibitory molecule; or
[1201] (v) an agent that decreases the level or activity of a T_{REG} cell.

[1202] In another aspect, the invention features a composition comprising an immune effector cell (e.g., a population of immune effector cells) comprising a CAR molecule (e.g., a CAR molecule as described herein) for use in treating a subject having a disease associated with expression of a tumor antigen, e.g., a disorder as described herein.

[1203] In certain embodiments of any of the aforesaid methods or uses, the disease associated with a tumor antigen, e.g., a tumor antigen described herein, is selected from a proliferative disease such as a cancer or malignancy or a precancerous condition such as a myelodysplasia, a myelodysplastic syndrome or a preleukemia, or is a non-cancer related indication associated with expression of a tumor antigen described herein. In one embodiment, the disease is a cancer described herein, e.g., a cancer described herein as being associated with a target described herein. In one embodiment, the disease is a hematologic cancer. In one embodiment, the hematologic cancer is leukemia. In one embodiment, the cancer is selected from the group consisting of one or more acute leukemias including but not limited to B-cell acute lymphoid leukemia (“BALL”), T-cell acute lymphoid leukemia (“TALL”), acute lymphoid leukemia (ALL); one or more chronic leukemias including but not limited to chronic myelogenous leukemia (CML), chronic lymphocytic leukemia (CLL); additional hematologic cancers or hematologic conditions including, but not limited to B cell prolymphocytic leukemia, blastic plasmacytoid dendritic cell neoplasm, Burkitt's lymphoma, diffuse large B cell lymphoma, follicular lymphoma, hairy cell leukemia, small cell- or a large cell-follicular lymphoma, malignant lymphoproliferative conditions, MALT lymphoma, mantle cell lymphoma, Marginal zone lymphoma, multiple myeloma, myelodysplasia and myelodysplastic syndrome, non-Hodgkin lymphoma, Hodgkin lymphoma, plasmablastic lymphoma, plasmacytoid dendritic cell neoplasm, Waldenstrom macroglobulinemia, and “preleukemia” which are a diverse collection of hematological conditions united by ineffective production (or dysplasia) of myeloid blood cells, and to disease associated with expression of a tumor antigen described herein include, but not limited to, atypical and/or non-classical cancers, malignancies, precancerous conditions or proliferative diseases expressing a tumor antigen as described herein; and any combination thereof. In another embodiment, the disease associated with a tumor antigen described herein is a solid tumor.

[1204] In certain embodiments, the methods or uses are carried out in combination with an agent that increases the efficacy of the immune effector cell, e.g., an agent as described herein.

[1205] In any of the aforesaid methods or uses, the disease associated with expression of the tumor antigen is selected from the group consisting of a proliferative disease, a precancerous condition, a cancer, and a non-cancer related indication associated with expression of the tumor antigen.

[1206] The cancer can be a hematologic cancer, e.g., a cancer chosen from one or more of chronic lymphocytic leukemia (CLL), acute leukemias, acute lymphoid leukemia (ALL), acute myeloid leukemia (AML), B-cell acute lymphoid leukemia (B-ALL), T-cell acute lymphoid leukemia (T-ALL), chronic myelogenous leukemia (CML), B cell prolymphocytic leukemia, blastic plasmacytoid dendritic cell neoplasm, Burkitt's lymphoma, diffuse large B cell lymphoma, follicular lymphoma, hairy cell leukemia, small cell- or a large cell-follicular lymphoma, malignant lymphoproliferative conditions, MALT lymphoma, mantle cell lymphoma, marginal zone lymphoma, multiple myeloma, myelodysplasia and myelodysplastic syndrome, non-Hodgkin's lymphoma, Hodgkin's lymphoma, plasmablastic lymphoma, plasmacytoid dendritic cell neoplasm, Waldenstrom macroglobulinemia, or pre-leukemia.

[1207] The cancer can also be chosen from colon cancer, rectal cancer, renal-cell carcinoma, liver cancer, non-small cell carcinoma of the lung, cancer of the small intestine, cancer of the esophagus, melanoma, bone cancer, pancreatic cancer, skin cancer, cancer of the head or neck, cutaneous or intraocular malignant melanoma, uterine cancer, ovarian cancer, rectal cancer, cancer of the anal region, stomach cancer, testicular cancer, uterine cancer, carcinoma of the fallopian tubes, carcinoma of the endometrium, carcinoma of the cervix, carcinoma of the vagina, carcinoma of the vulva, Hodgkin's Disease, non-Hodgkin's lymphoma, cancer of the endocrine system, cancer of the thyroid gland, cancer of the parathyroid gland, cancer of the adrenal gland, sarcoma of soft tissue, cancer of the urethra, cancer of the penis, solid tumors of childhood, cancer of the bladder, cancer of the kidney or ureter, carcinoma of the renal pelvis, neoplasm of the central nervous system (CNS), primary CNS lymphoma, tumor angiogenesis, spinal axis tumor, brain stem glioma, pituitary adenoma, Kaposi's sarcoma, epidermoid cancer, squamous cell cancer, T-cell lymphoma, environmentally induced cancers, combinations of said cancers, and metastatic lesions of said cancers.

[1208] In certain embodiments of the methods or uses described herein, the CAR molecule is administered in combination with an agent that increases the efficacy of the immune effector cell (in addition to the LSD1 inhibitor), e.g., one or more of a protein phosphatase inhibitor, a kinase inhibitor, a cytokine, an inhibitor of an immune inhibitory molecule; or an agent that decreases the level or activity of a T_{REG} cell.

[1209] In certain embodiments of the methods or uses described herein, the protein phosphatase inhibitor is a SHP-1 inhibitor and/or an SHP-2 inhibitor.

[1210] In other embodiments of the methods or uses described herein, kinase inhibitor is chosen from one or more of a CDK4 inhibitor, a CDK4/6 inhibitor (e.g., palbociclib), a BTK inhibitor (e.g., ibrutinib or RN-486), an mTOR inhibitor (e.g., rapamycin or everolimus (RAD001)), an MNK inhibitor, or a dual P13K/mTOR inhibitor. In one embodiment, the BTK inhibitor does not reduce or inhibit the kinase activity of interleukin-2-inducible kinase (ITK).

[1211] In other embodiments of the methods or uses described herein, the agent that inhibits the immune inhibitory molecule comprises an antibody or antibody fragment, an inhibitory nucleic acid, a clustered regularly interspaced short palindromic repeats (CRISPR), a transcription-activator like effector nuclease (TALEN), or a zinc finger endonuclease (ZFN) that inhibits the expression of the inhibitory molecule.

[1212] In other embodiments of the methods or uses described herein, the agent that decreases the level or activity of the TREG cells is chosen from cyclophosphamide, anti-GITR antibody, CD25-depletion, or a combination thereof.

[1213] In certain embodiments of the methods or uses described herein, the immune inhibitory molecule is selected from the group consisting of PD1, PD-L1, CTLA-4, TIM-3, LAG-3, VISTA, BTLA, TIGIT, LAIR1, CD160, 2B4, TGF beta, CEACAM-1, CEACAM-3, and CEACAM-5.

[1214] In other embodiments, the agent that inhibits the inhibitory molecule comprises a first polypeptide comprising an inhibitory molecule or a fragment thereof and a second polypeptide that provides a positive signal to the cell, and wherein the first and second polypeptides are expressed on the CAR-containing immune cells, wherein (i) the first polypeptide comprises PD1, PD-L1, CTLA-4, TIM-3, LAG3, VISTA, BTLA, TIGIT, LAIR1, CD160, 2B4, TGF beta, CEACAM-1, CEACAM-3, and CEACAM-5 or a fragment thereof; and/or (ii) the second polypeptide comprises an intracellular signaling domain comprising a primary signaling domain and/or a costimulatory signaling domain. In one embodiment, the primary signaling domain comprises a functional domain of CD3 zeta; and/or the costimulatory signaling domain comprises a functional domain of a protein selected from 4113B, CD27 and CD28.

[1215] In other embodiments, cytokine is chosen from IL-7, IL-15 or IL-21, or combinations thereof.

[1216] In other embodiments, the immune effector cell comprising the CAR molecule and a second, e.g., any of the combination therapies disclosed herein (e.g., the agent that that increases the efficacy of the immune effector cell) are administered substantially simultaneously or sequentially.

[1217] In other embodiments, the immune cell comprising the CAR molecule is administered in combination with a molecule that targets GITR and/or modulates GITR function. In certain embodiments, the molecule targeting GITR and/or modulating GITR function is administered prior to the CAR-expressing cell or population of cells, or prior to apheresis.

[1218] In one embodiment, lymphocyte infusion, for example allogeneic lymphocyte infusion, is used in the treatment of the cancer, wherein the lymphocyte infusion comprises at least one CAR-expressing cell of the present invention. In one embodiment, autologous lymphocyte infusion is used in the treatment of the cancer, wherein the autologous lymphocyte infusion comprises at least one CAR-expressing cell described herein.

[1219] In one embodiment, the cell is a T cell and the T cell is diaglycerol kinase (DGK) deficient. In one embodiment, the cell is a T cell and the T cell is Ikaros deficient. In one embodiment, the cell is a T cell and the T cell is both DGK and Ikaros deficient.

[1220] In one embodiment, the method includes administering a cell expressing the CAR molecule, as described herein, in combination with an agent which enhances the activity of a CAR-expressing cell, wherein the agent is a cytokine, e.g., IL-7, IL-15, IL-18, IL-21, or a combination thereof. The cytokine can be delivered in combination with, e.g., simultaneously or shortly after, administration of the CAR-expressing cell. Alternatively, the cytokine can be delivered after a prolonged period of time after administration of the CAR-expressing cell, e.g., after assessment of the subject's response to the CAR-expressing cell. In one embodiment the cytokine is administered to the subject simultaneously (e.g., administered on the same day) with or shortly after administration (e.g., administered 1 day, 2 days, 3 days, 4 days, 5 days, 6 days, or 7 days after administration) of the cell or population of cells of any of claims 61-80. In other embodiments, the cytokine is administered to the subject after a prolonged period of time (e.g., e.g., at least 2 weeks, 3 weeks, 4 weeks, 6 weeks, 8 weeks, 10 weeks, or more) after administration of the cell or population of cells of any of claims 61-80, or after assessment of the subject's response to the cell.

[1221] In other embodiments, the cells expressing a CAR molecule are administered in combination with an agent that ameliorates one or more side effects associated with administration of a cell expressing a CAR molecule. Side effects associated with the CAR-expressing cell can be chosen from cytokine release syndrome (CRS) or hemophagocytic lymphohistiocytosis (HLH).

[1222] In embodiments of any of the aforeseaid methods or uses, the cells expressing the CAR molecule are administered in combination with an agent that treats the disease associated with expression of the tumor antigen, e.g., any of the second or third therapies disclosed herein. Additional exemplary combinations include one or more of the following.

[1223] In another embodiment, the cell expressing the CAR molecule, e.g., as described herein, can be administered in combination with another agent, e.g., a kinase inhibitor and/or checkpoint inhibitor described herein. In an embodiment, a cell expressing the CAR molecule can further express another agent, e.g., an agent which enhances the activity of a CAR-expressing cell.

[1224] For example, in one embodiment, the agent that enhances the activity of a CAR-expressing cell can be an agent which inhibits an inhibitory molecule (e.g., an immune inhibitor molecule). Examples of inhibitory molecules include PD1, PD-L1, CTLA-4, TIM-3, CEACAM (e.g., CEACAM-1, CEACAM-3 and/or CEACAM-5), LAG-3, VISTA, BTLA, TIGIT, LAIR1, CD160, 2B4 and TGF beta.

[1225] In one embodiment, the agent that inhibits the inhibitory molecule is an inhibitory nucleic acid is a dsRNA, a siRNA, or a shRNA. In embodiments, the inhibitory nucleic acid is linked to the nucleic acid that encodes a component of the CAR molecule. For example, the inhibitory molecule can be expressed on the CAR-expressing cell.

[1226] In another embodiment, the agent which inhibits an inhibitory molecule, e.g., is a molecule described herein, e.g., an agent that comprises a first polypeptide, e.g., an inhibitory molecule, associated with a second polypeptide that provides a positive signal to the cell, e.g., an intracellular signaling domain described herein. In one embodiment, the agent comprises a first polypeptide, e.g., of an inhibitory molecule such as PD-1, PD-L1, CTLA-4, TIM-3, CEACAM (e.g., CEACAM-1, CEACAM-3 and/or CEACAM-5), LAG-3, VISTA, BTLA, TIGIT, LAIR1, CD160, 2B4 or TGF beta, or a fragment of any of these (e.g., at least a portion of the extracellular domain of any of these), and a second polypeptide which is an intracellular signaling domain described herein (e.g., comprising a costimulatory domain (e.g., 41BB, CD27 or CD28, e.g., as described herein) and/or a primary signaling domain (e.g., a CD3 zeta signaling domain described herein). In one embodiment, the agent comprises a first polypeptide of PD1 or a fragment thereof (e.g., at least a portion of the extracellular domain of PD1), and a second polypeptide of an intracellular signaling domain described herein (e.g., a CD28 signaling domain described herein and/or a CD3 zeta signaling domain described herein).

[1227] In one embodiment, the CAR-expressing immune effector cell of the present invention, e.g., T cell or NK cell, is administered to a subject that has received a previous stem cell transplantation, e.g., autologous stem cell transplantation.

[1228] In one embodiment, the CAR—expressing immune effector cell of the present invention, e.g., T cell or NK cells, is administered to a subject that has received a previous dose of melphalan.

[1229] In one embodiment, the cell expressing a CAR molecule, e.g., a CAR molecule described herein, is administered in combination with an agent that increases the efficacy of a cell expressing a CAR molecule, e.g., an agent described herein.

[1230] In one embodiment, the cells expressing a CAR molecule, e.g., a CAR molecule described herein, are administered in combination with an LSD1 inhibitor. While not wishing to be bound by theory, it is believed that treatment with an LSD1 inhibitor is accompanied by a decrease in PD-1 positive T cells or an increase in PD-1 negative cells. PD-1 positive T cells, but not PD-1 negative T cells, can be exhausted by engagement with cells which express a PD-1 ligand, e.g., PD-L1 or PD-L2.

[1231] In an embodiment this approach can be used to optimize the performance of CAR cells described herein in the subject. While not wishing to be bound by theory, it is believed that, in an embodiment, the performance of endogenous, non-modified immune effector cells, e.g., T cells or NK cells, is improved. While not wishing to be bound by theory, it is believed that, in an embodiment, the performance of a target antigen CAR− expressing cell is improved. In other embodiments, cells, e.g., T cells or NK cells, which have, or will be engineered to express a CAR, can be treated ex vivo by contact with an amount of an LSD1 inhibitor that increases the number of PD1 negative immune effector cells, e.g., T cells or increases the ratio of PD1 negative immune effector cells, e.g., T cells/PD1 positive immune effector cells, e.g., T cells.

[1232] In an embodiment, administration of an LSD1 inhibitor is initiated prior to administration of an CAR expressing cell described herein, e.g., T cells or NK cells. In an embodiment, the CAR cells are administered after a sufficient time, or sufficient dosing, of an LSD1 inhibitor, such that the level of PD1 negative immune effector cells, e.g., T cells or NK cells, or the ratio of PD1 negative immune effector cells, e.g., T cells/PD1 positive immune effector cells, e.g., T cells, has been, at least transiently, increased.

[1233] In an embodiment, the cell, e.g., T cell or NK cell, to be engineered to express a CAR, is harvested after a sufficient time, or after sufficient dosing of the LSD1 inhibitor, such that the level of PD1 negative immune effector cells, e.g., T cells, or the ratio of PD1 negative immune effector cells, e.g., T cells/PD1 positive immune effector cells, e.g., T cells, in the subject or harvested from the subject has been, at least transiently, increased.

[1234] In one embodiment, the cell expressing a CAR molecule, e.g., a CAR molecule described herein, is administered in combination with an agent that ameliorates one or more side effect associated with administration of a cell expressing a CAR molecule, e.g., an agent described herein.

[1235] In one embodiment, the cell expressing a CAR molecule, e.g., a CAR molecule described herein, is administered in combination with an agent that treats the disease associated with a cancer associated antigen as described herein, e.g., an agent described herein.

[1236] In one embodiment, a cell expressing two or more CAR molecules, e.g., as described herein, is administered to a subject in need thereof to treat cancer. In one embodiment, a population of cells including a CAR expressing cell, e.g., as described herein, is administered to a subject in need thereof to treat cancer.

[1237] In one embodiment, the cell expressing a CAR molecule, e.g., a CAR molecule described herein, is administered at a dose and/or dosing schedule described herein.

[1238] In one embodiment, the CAR molecule is introduced into immune effector cells (e.g., T cells, NK cells), e.g., using in vitro transcription, and the subject (e.g., human) receives an initial administration of cells comprising a CAR molecule, and one or more subsequent administrations of cells comprising a CAR molecule, wherein the one or more subsequent administrations are administered less than 15 days, e.g., 14, 13, 12, 11, 10, 9, 8, 7, 6, 5, 4, 3, or 2 days after the previous administration. In one embodiment, more than one administration of cells comprising a CAR molecule are administered to the subject (e.g., human) per week, e.g., 2, 3, or 4 administrations of cells comprising a CAR molecule are administered per week. In one embodiment, the subject (e.g., human subject) receives more than one administration of cells comprising a CAR molecule per week (e.g., 2, 3 or 4 administrations per week) (also referred to herein as a cycle), followed by a week of no administration of cells comprising a CAR molecule, and then one or more additional administration of cells comprising a CAR molecule (e.g., more than one administration of the cells comprising a CAR molecule per week) is administered to the subject. In another embodiment, the subject (e.g., human subject) receives more than one cycle of cells comprising a CAR molecule, and the time between each cycle is less than 10, 9, 8, 7, 6, 5, 4, or 3 days. In one embodiment, the cells comprising a CAR molecule are administered every other day for 3 administrations per week. In one embodiment, the cells comprising a CAR molecule are administered for at least two, three, four, five, six, seven, eight or more weeks.

[1239] In one embodiment, the cells expressing a CAR molecule, e.g., a CAR molecule described herein, are administered as a first line treatment for the disease, e.g., the cancer, e.g., the cancer described herein. In another embodiment, the cells expressing a CAR molecule, e.g., a CAR molecule described herein, are administered as a second, third, fourth line treatment for the disease, e.g., the cancer, e.g., the cancer described herein.

[1240] In one embodiment, a population of cells described herein is administered.

[1241] In another aspect, the invention pertains to the isolated nucleic acid molecule encoding a CAR of the invention, the isolated polypeptide molecule of a CAR of the invention, the vector comprising a CAR of the invention, and the cell comprising a CAR of the invention for use as a medicament.

[1242] In another aspect, the invention pertains to a the isolated nucleic acid molecule encoding a CAR of the invention, the isolated polypeptide molecule of a CAR of the invention, the vector comprising a CAR of the invention, and the cell comprising a CAR of the invention for use in the treatment of a disease expressing a cancer associated antigen as described herein.

[1243] In another aspect, the invention pertains to a cell expressing a CAR molecule described herein for use as a medicament in combination with a cytokine, e.g., IL-7, IL-15 and/or IL-21 as described herein. In another aspect, the invention pertains to a cytokine described herein for use as a medicament in combination with a cell expressing a CAR molecule described herein.

[1244] In another aspect, the invention pertains to a cell expressing a CAR molecule described herein for use as a medicament in combination with a kinase inhibitor and/or a checkpoint inhibitor as described herein. In another aspect, the invention pertains to a kinase inhibitor and/or a checkpoint inhibitor described herein for use as a medicament in combination with a cell expressing a CAR molecule described herein.

[1245] In another aspect, the invention pertains to a cell expressing a CAR molecule described herein for use in combination with a cytokine, e.g., IL-7, IL-15 and/or IL-21 as described herein, in the treatment of a disease expressing a tumor antigen targeted by the CAR. In another aspect, the invention pertains to a cytokine described herein for use in combination with a cell expressing a CAR molecule described herein, in the treatment of a disease expressing a tumor antigen targeted by the CAR.

[1246] In another aspect, the invention pertains to a cell expressing a CAR molecule described herein for use in combination with a kinase inhibitor and/or a checkpoint inhibitor as described herein, in the treatment of a disease expressing a tumor antigen targeted by the CAR. In another aspect, the invention pertains to a kinase inhibitor and/or a checkpoint inhibitor described herein for use in combination with a cell expressing a CAR molecule described herein, in the treatment of a disease expressing a tumor antigen targeted by the CAR.

[1247] In another aspect, the present invention provides a method comprising administering a CAR molecule, e.g., a CAR molecule described herein, or a cell comprising a nucleic acid encoding a CAR molecule, e.g., a CAR molecule described herein. In one embodiment, the subject has a disorder described herein, e.g., the subject has cancer, e.g., the subject has a cancer and has tumor-supporting cells which express a tumor-supporting antigen described herein. In one embodiment, the subject is a human.

[1248] In another aspect, the invention pertains to a method of treating a subject having a disease associated with expression of a tumor-supporting antigen as described herein comprising administering to the subject an effective amount of a cell comprising a CAR molecule, e.g., a CAR molecule described herein.

[1249] In yet another aspect, the invention features a method of treating a subject having a disease associated with expression of a tumor-supporting antigen, comprising administering to the subject an effective amount of a cell, e.g., an immune effector cell (e.g., a population of immune effector cells) comprising a CAR molecule, wherein the CAR molecule comprises an antigen binding domain, a transmembrane domain, and an intracellular domain, said intracellular domain comprises a costimulatory domain and/or a primary signaling domain, wherein said antigen binding domain binds to the tumor-supporting antigen associated with the disease, e.g. a tumor-supporting antigen as described herein.

[1250] In another aspect, the invention features a composition comprising an immune effector cell (e.g., a population of immune effector cells) comprising a CAR molecule (e.g., a CAR molecule as described herein) for use in treating a subject having a disease associated with expression of a tumor-supporting antigen, e.g., a disorder as described herein.

[1251] In any of the aforesaid methods or uses, the disease associated with expression of the tumor-supporting antigen is selected from the group consisting of a proliferative disease, a precancerous condition, a cancer, and a non-cancer related indication associated with expression of the tumor-supporting antigen. In an embodiment, the disease associated with a tumor-supporting antigen described herein is a solid tumor.

[1252] In one embodiment of the methods or uses described herein, the CAR molecule is administered in combination with another agent. In one embodiment, the agent can be a kinase inhibitor, e.g., a CDK4/6 inhibitor, a BTK inhibitor, an mTOR inhibitor, a MNK inhibitor, or a dual PI3K/mTOR inhibitor, and combinations thereof. In one embodiment, the kinase inhibitor is a CDK4 inhibitor, e.g., a CDK4 inhibitor described herein, e.g., a CD4/6 inhibitor, such as, e.g., 6-Acetyl-8-cyclopentyl-5-methyl-2-(5-piperazin-1-yl-pyridin-2-ylamino)-8H-pyrido[2,3-d]pyrimidin-7-one, hydrochloride (also referred to as palbociclib or PD0332991). In one embodiment, the kinase inhibitor is a BTK inhibitor, e.g., a BTK inhibitor described herein, such as, e.g., ibrutinib. In one embodiment, the kinase inhibitor is an mTOR inhibitor, e.g., an mTOR inhibitor described herein, such as, e.g., rapamycin, a rapamycin analog, OSI-027. The mTOR inhibitor can be, e.g., an mTORC1 inhibitor and/or an mTORC2 inhibitor, e.g., an mTORC1 inhibitor and/or mTORC2 inhibitor described herein. In one embodiment, the kinase inhibitor is a MNK inhibitor, e.g., a MNK inhibitor described herein, such as, e.g., 4-amino-5-(4-fluoroanilino)-pyrazolo [3,4-d] pyrimidine. The MNK inhibitor can be, e.g., a MNK1a, MNK1b, MNK2a and/or MNK2b inhibitor. The dual PI3K/mTOR inhibitor can be, e.g., PF-04695102.

[1253] In one embodiment of the methods or uses described herein, the kinase inhibitor is a CDK4 inhibitor selected from aloisine A; flavopiridol or HMR-1275, 2-(2-chlorophenyl)-5,7-dihydroxy-8-[(3S,4R)-3-hydroxy-1-methyl-4-piperidinyl]-4-chromenone; crizotinib (PF-02341066; 2-(2-Chlorophenyl)-5,7-dihydroxy-8-[(2R,3S)-2-(hydroxymethyl)-1-methyl-3-pyrrolidinyl]-4H-1-benzopyran-4-one, hydrochloride (P276-00); 1-methyl-5-[[2-[5-(trifluoromethyl)-1H-imidazol-2-yl]-4-pyridinyl]oxy]-N-[4-(trifluoromethyl)phenyl]-1H-benzimidazol-2-amine (RAF265); indisulam (E7070); roscovitine (CYC202); palbociclib (PD0332991); dinaciclib (SCH727965); N-[5-[[(5-tert-butyloxazol-2-yl)methyl]thio]thiazol-2-yl]piperidine-4-carboxamide (BMS 387032); 4-[[9-chloro-7-(2,6-difluorophenyl)-5H-pyrimido[5,4-c/][2]benzazepin-2-yl]amino]-benzoic acid (MLN8054); 5-[3-(4,6-difluoro-1H-benzimidazol-2-yl)-1H-indazol-5-yl]-N-ethyl-4-methyl-3-pyridinemethanamine (AG-024322); 4-(2,6-dichlorobenzoylamino)-1H-pyrazole-3-carboxylic acid N-(piperidin-4-yl)amide (AT7519); 4-[2-methyl-1-(1-methylethyl)-1H-imidazol-5-yl]-N-[4-(methylsulfonyl)phenyl]-2-pyrimidinamine (AZD5438); and XL281 (BMS908662).

[1254] In one embodiment of the methods or uses described herein, the kinase inhibitor is a CDK4 inhibitor, e.g., palbociclib (PD0332991), and the palbociclib is administered at a dose of about 50 mg, 60 mg, 70 mg, 75 mg, 80 mg, 90 mg, 100 mg, 105 mg, 110 mg, 115 mg, 120 mg, 125 mg, 130 mg, 135 mg (e.g., 75 mg, 100 mg or 125 mg) daily for a period of time, e.g., daily for 14-21 days of a 28 day cycle, or daily for 7-12 days of a 21 day cycle. In one embodiment, 1, 2, 3, 4, 5, 6, 7, 8, 9, 10, 11, 12 or more cycles of palbociclib are administered.

[1255] In one embodiment of the methods or uses described herein, the kinase inhibitor is a BTK inhibitor selected from ibrutinib (PCI-32765); GDC-0834; RN-486; CGI-560; CGI-1764; HM-71224; CC-292; ONO-4059; CNX-774; and LFM-A13. In one embodiment, the BTK inhibitor does not reduce or inhibit the kinase activity of interleukin-2-inducible kinase (ITK), and is selected from GDC-0834; RN-486; CGI-560; CGI-1764; HM-71224; CC-292; ONO-4059; CNX-774; and LFM-A13.

[1256] In one embodiment of the methods or uses described herein, the kinase inhibitor is a BTK inhibitor, e.g., ibrutinib (PCI-32765), and the ibrutinib is administered at a dose of about 250 mg, 300 mg, 350 mg, 400 mg, 420 mg, 440 mg, 460 mg, 480 mg, 500 mg, 520 mg, 540 mg, 560 mg, 580 mg, 600 mg (e.g., 250 mg, 420 mg or 560 mg) daily for a period of time, e.g., daily for 21 day cycle, or daily for 28 day cycle. In one embodiment, 1, 2, 3, 4, 5, 6, 7, 8, 9, 10, 11, 12 or more cycles of ibrutinib are administered.

[1257] In one embodiment of the methods or uses described herein, the kinase inhibitor is a BTK inhibitor that does not inhibit the kinase activity of ITK, e.g., RN-486, and RN-486 is administered at a dose of about 100 mg, 110 mg, 120 mg, 130 mg, 140 mg, 150 mg, 160 mg, 170 mg, 180 mg, 190 mg, 200 mg, 210 mg, 220 mg, 230 mg, 240 mg, 250 mg (e.g., 150 mg, 200 mg or 250 mg) daily for a period of time, e.g., daily a 28 day cycle. In one embodiment, 1, 2, 3, 4, 5, 6, 7, or more cycles of RN-486 are administered.

[1258] In one embodiment of the methods or uses described herein, the kinase inhibitor is an mTOR inhibitor selected from temsirolimus; ridaforolimus (1R,2R,4S)-4-[(2R)-2 [(1R,9S,12S,15R,16E,18R,19R,21R,23S,24E,26E,28Z,30S,32S,35R)-1,18-di hydroxy-19,30- dimethoxy-15,17,21,23,29,35-hexamethyl-2,3,10,14,20-pentaoxo-11,36-dioxa-4-azatricyclo[30.3.1.0^{4,9}] hexatriaconta-16,24,26,28-tetraen-12-yl]propyl]-2-methoxycyclohexyl dimethylphosphinate, also known as AP23573 and MK8669; everolimus (RAD001); rapamycin (AY22989); simapimod; (5-{2,4-bis[(35)-3-methylmorpholin-4-yl]pyrido[2,3-d]pyrimidin-7-yl}-2-methoxyphenyl)methanol (AZD8055); 2-amino-8-[trans-4-(2-hydroxyethoxy)cyclohexyl]-6-(6-methoxy-3-pyridinyl)-4-methyl-pyrido[2,3-d]pyrimidin-7(8H)-one (PF04691502); and N²-[1,4-dioxo-4-[[4-(4-oxo-8-phenyl-4H-1-benzopyran-2-yl)morpholinium-4-yl]methoxy]butyl]-L-arginylglycyl-L-α-aspartylL-serine-, inner salt (SF1126) (SEQ ID NO: 1937); and XL765.

[1259] In one embodiment of the methods or uses described herein, the kinase inhibitor is an mTOR inhibitor, e.g., rapamycin, and the rapamycin is administered at a dose of about 3 mg, 4 mg, 5 mg, 6 mg, 7 mg, 8 mg, 9 mg, 10 mg (e.g., 6 mg) daily for a period of time, e.g., daily for 21 day cycle, or daily for 28 day cycle. In one embodiment, 1, 2, 3, 4, 5, 6, 7, 8, 9, 10, 11, 12 or more cycles of rapamycin are administered. In one embodiment, the kinase inhibitor is an mTOR inhibitor, e.g., everolimus and the everolimus is administered at a dose of about 2 mg, 2.5 mg, 3 mg, 4 mg, 5 mg, 6 mg, 7 mg, 8 mg, 9 mg, 10 mg, 11 mg, 12 mg, 13 mg, 14 mg, 15 mg (e.g., 10 mg) daily for a period of time, e.g., daily for 28 day cycle. In one embodiment, 1, 2, 3, 4, 5, 6, 7, 8, 9, 10, 11, 12 or more cycles of everolimus are administered.

[1260] In one embodiment of the methods or uses described herein, the kinase inhibitor is an MNK inhibitor selected from CGP052088; 4-amino-3-(p-fluorophenylamino)-pyrazolo [3,4-d] pyrimidine (CGP57380); cercosporamide; ETC-1780445-2; and 4-amino-5-(4-fluoroanilino)-pyrazolo [3,4-d] pyrimidine.

[1261] In one embodiment of the methods or uses described herein, the kinase inhibitor is a dual phosphatidylinositol 3-kinase (PI3K) and mTOR inhibitor selected from 2-Amino-8-[trans-4-(2-hydroxyethoxy)cyclohexyl]-6-(6-methoxy-3-pyridinyl)-4-methyl-pyrido[2,3-d]pyrimidin-7(8H)-one (PF-04691502); N-[4-[[4-(Dimethylamino)-1-piperidinyl]carbonyl]phenyl]-N′-[4-(4,6-di-4-morpholinyl-1,3,5-triazin-2-yl)phenyl]urea (PF-05212384, PKI-587); 2-Methyl-2-{4-[3-methyl-2-oxo-8-(quinolin-3-yl)-2,3-dihydro-1H-imidazo[4,5-c]quinolin-1-yl]phenyl}propanenitrile (BEZ-235); apitolisib (GDC-0980, RG7422); 2,4-Difluoro-N-{2-(methyloxy)-5-[4-(4-pyridazinyl)-6-quinolinyl]-3-pyridinyl}benzenesulfonamide (GSK2126458); 8-(6-methoxypyridin-3-yl)-3-methyl-1-(4-(piperazin-1-yl)-3-(trifluoromethyl)phenyl)-1H-imidazo[4,5-c]quinolin-2(3H)-one Maleic acid (NVP-BGT226); 3-[4-(4-Morpholinylpyrido[3′,2′:4,5]furo[3,2-d]pyrimidin-2-yl]phenol (PI-103); 5-(9-isopropyl-8-methyl-2-morpholino-9H-purin-6-yl)pyrimidin-2-amine (VS-5584, SB2343); and N-[2-[(3,5-Dimethoxyphenyl)amino]quinoxalin-3-yl]-4-[(4-methyl-3-methoxyphenyl)carbonyl]aminophenylsulfonamide (XL765).

[1262] In one embodiment of the methods or uses described herein, a CAR expressing immune effector cell described herein is administered to a subject in combination with a protein tyrosine phosphatase inhibitor, e.g., a protein tyrosine phosphatase inhibitor described herein. In one embodiment, the protein tyrosine phosphatase inhibitor is an SHP-1 inhibitor, e.g., an SHP-1 inhibitor described herein, such as, e.g., sodium stibogluconate. In one embodiment, the protein tyrosine phosphatase inhibitor is an SHP-2 inhibitor.

[1263] In one embodiment of the methods or uses described herein, the CAR molecule is administered in combination with another agent, and the agent is a cytokine. The cytokine can be, e.g., IL-7, IL-15, IL-21, or a combination thereof. In another embodiment, the CAR molecule is administered in combination with a checkpoint inhibitor, e.g., a checkpoint inhibitor described herein. For example, in one embodiment, the check point inhibitor inhibits an inhibitory molecule selected from PD-1, PD-L1, CTLA-4, TIM-3, CEACAM (e.g., CEACAM-1, CEACAM-3 and/or CEACAM-5), LAG-3, VISTA, BTLA, TIGIT, LAIR1, CD160, 2B4 and TGF beta.

[1264] In one aspect, the CAR of the invention can be used to eradicate a normal cell that express a tumor antigen as described herein, thereby applicable for use as a cellular conditioning therapy prior to cell transplantation. In one aspect, the normal cell that expresses a tumor antigen as described herein is a normal stem cell and the cell transplantation is a stem cell transplantation.

### Therapeutic Applications

[1265] In another aspect, a method of treating a subject, e.g., reducing or ameliorating, a hyperproliferative condition or disorder (e.g., a cancer), e.g., solid tumor, a soft tissue tumor, or a metastatic lesion, in a subject is provided. As used herein, the term “cancer” is meant to include all types of cancerous growths or oncogenic processes, metastatic tissues or malignantly transformed cells, tissues, or organs, irrespective of histopathologic type or stage of invasiveness. Examples of solid tumors include malignancies, e.g., sarcomas, adenocarcinomas, and carcinomas, of the various organ systems, such as those affecting liver, lung, breast, lymphoid, gastrointestinal (e.g., colon), genitourinary tract (e.g., renal, urothelial cells), prostate and pharynx. Adenocarcinomas include malignancies such as most colon cancers, rectal cancer, renal-cell carcinoma, liver cancer, non-small cell carcinoma of the lung, cancer of the small intestine and cancer of the esophagus. In one embodiment, the cancer is a melanoma, e.g., an advanced stage melanoma. Metastatic lesions of the aforementioned cancers can also be treated or prevented using the methods and compositions of the invention. Examples of other cancers that can be treated include bone cancer, pancreatic cancer, skin cancer, cancer of the head or neck, cutaneous or intraocular malignant melanoma, uterine cancer, ovarian cancer, rectal cancer, cancer of the anal region, stomach cancer, testicular cancer, uterine cancer, carcinoma of the fallopian tubes, carcinoma of the endometrium, carcinoma of the cervix, carcinoma of the vagina, carcinoma of the vulva, Hodgkin Disease, non-Hodgkin lymphoma, cancer of the esophagus, cancer of the small intestine, cancer of the endocrine system, cancer of the thyroid gland, cancer of the parathyroid gland, cancer of the adrenal gland, sarcoma of soft tissue, cancer of the urethra, cancer of the penis, chronic or acute leukemias including acute myeloid leukemia, chronic myeloid leukemia, acute lymphoblastic leukemia, chronic lymphocytic leukemia, solid tumors of childhood, lymphocytic lymphoma, cancer of the bladder, cancer of the kidney or ureter, carcinoma of the renal pelvis, neoplasm of the central nervous system (CNS), primary CNS lymphoma, tumor angiogenesis, spinal axis tumor, brain stem glioma, pituitary adenoma, Kaposi's sarcoma, epidermoid cancer, squamous cell cancer, T-cell lymphoma, environmentally induced cancers including those induced by asbestos, and combinations of said cancers. Treatment of metastatic cancers, e.g., metastatic cancers that express PD-L1 (Iwai et al. (2005) Int. Immunol. 17:133-144) can be effected using the antibody molecules described herein.

[1266] Exemplary cancers whose growth can be inhibited include cancers typically responsive to immunotherapy. Non-limiting examples of cancers for treatment include melanoma (e.g., metastatic malignant melanoma), renal cancer (e.g. clear cell carcinoma), prostate cancer (e.g. hormone refractory prostate adenocarcinoma), breast cancer, colon cancer and lung cancer (e.g. non-small cell lung cancer). Additionally, refractory or recurrent malignancies can be treated using the molecules described herein.

[1267] In one aspect, the invention pertains to a vector comprising a CAR operably linked to promoter for expression in mammalian immune effector cells (e.g., T cells, NK cells). In one aspect, the invention provides a recombinant immune effector cell expressing a CAR of the present invention for use in treating cancer expressing a cancer associate antigen as described herein. In one aspect, CAR-expressing cells of the invention is capable of contacting a tumor cell with at least one cancer associated antigen expressed on its surface such that the CAR-expressing cell targets the cancer cell and growth of the cancer is inhibited.

[1268] In one aspect, the invention pertains to a method of inhibiting growth of a cancer, comprising contacting the cancer cell with a CAR-expressing cell of the present invention such that the CART is activated in response to the antigen and targets the cancer cell, wherein the growth of the tumor is inhibited.

[1269] In one aspect, the invention pertains to a method of treating cancer in a subject. The method comprises administering to the subject CAR-expressing cell of the present invention such that the cancer is treated in the subject. In one aspect, the cancer associated with expression of a cancer associate antigen as described herein is a hematological cancer. In one aspect, the hematological cancer is a leukemia or a lymphoma. In one aspect, a cancer associated with expression of a cancer associate antigen as described herein includes cancers and malignancies including, but not limited to, e.g., one or more acute leukemias including but not limited to, e.g., B-cell acute Lymphoid Leukemia (“BALL”), T-cell acute Lymphoid Leukemia (“TALL”), acute lymphoid leukemia (ALL); one or more chronic leukemias including but not limited to, e.g., chronic myelogenous leukemia (CML), Chronic Lymphoid Leukemia (CLL). Additional cancers or hematologic conditions associated with expression of a cancer associate antigen as described herein include, but are not limited to, e.g., B cell prolymphocytic leukemia, blastic plasmacytoid dendritic cell neoplasm, Burkitt's lymphoma, diffuse large B cell lymphoma, Follicular lymphoma, Hairy cell leukemia, small cell- or a large cell-follicular lymphoma, malignant lymphoproliferative conditions, MALT lymphoma, mantle cell lymphoma, Marginal zone lymphoma, multiple myeloma, myelodysplasia and myelodysplastic syndrome, non-Hodgkin lymphoma, plasmablastic lymphoma, plasmacytoid dendritic cell neoplasm, Waldenstrom macroglobulinemia, and “preleukemia” which are a diverse collection of hematological conditions united by ineffective production (or dysplasia) of myeloid blood cells, and the like. Further a disease associated with a cancer associate antigen as described herein expression include, but not limited to, e.g., atypical and/or non-classical cancers, malignancies, precancerous conditions or proliferative diseases associated with expression of a cancer associate antigen as described herein.

[1270] In some embodiments, a cancer that can be treated with CAR-expressing cell of the present invention is multiple myeloma. Generally, myeloma cells are thought to be negative for a cancer associate antigen as described herein expression by flow cytometry. Thus, in some embodiments, a CD19 CAR, e.g., as described herein, may be used to target myeloma cells. In some embodiments, cars of the present invention therapy can be used in combination with one or more additional therapies, e.g., lenalidomide treatment.

[1271] The invention includes a type of cellular therapy where immune effector cells (e.g., T cells, NK cells) are genetically modified to express a chimeric antigen receptor (CAR) and the CAR-expressing T cell or NK cell is infused to a recipient in need thereof. The infused cell is able to kill tumor cells in the recipient. Unlike antibody therapies, CAR-modified immune effector cells (e.g., T cells, NK cells) are able to replicate in vivo resulting in long-term persistence that can lead to sustained tumor control. In various aspects, the immune effector cells (e.g., T cells, NK cells) administered to the patient, or their progeny, persist in the patient for at least four months, five months, six months, seven months, eight months, nine months, ten months, eleven months, twelve months, thirteen months, fourteen month, fifteen months, sixteen months, seventeen months, eighteen months, nineteen months, twenty months, twenty-one months, twenty-two months, twenty-three months, two years, three years, four years, or five years after administration of the T cell or NK cell to the patient.

[1272] The invention also includes a type of cellular therapy where immune effector cells (e.g., T cells, NK cells) are modified, e.g., by in vitro transcribed RNA, to transiently express a chimeric antigen receptor (CAR) and the CART cell or NK cell is infused to a recipient in need thereof. The infused cell is able to kill tumor cells in the recipient. Thus, in various aspects, the immune effector cells (e.g., T cells, NK cells) administered to the patient, is present for less than one month, e.g., three weeks, two weeks, one week, after administration of the T cell or NK cell to the patient.

[1273] Without wishing to be bound by any particular theory, the anti-tumor immunity response elicited by the CAR-modified immune effector cells (e.g., T cells, NK cells) may be an active or a passive immune response, or alternatively may be due to a direct vs indirect immune response. In one aspect, the CAR transduced immune effector cells (e.g., T cells, NK cells) exhibit specific proinflammatory cytokine secretion and potent cytolytic activity in response to human cancer cells expressing the a cancer associate antigen as described herein, resist soluble a cancer associate antigen as described herein inhibition, mediate bystander killing and mediate regression of an established human tumor. For example, antigen-less tumor cells within a heterogeneous field of a cancer associate antigen as described herein-expressing tumor may be susceptible to indirect destruction by a cancer associate antigen as described herein-redirected immune effector cells (e.g., T cells, NK cells) that has previously reacted against adjacent antigen-positive cancer cells.

[1274] In one aspect, the fully-human CAR-modified immune effector cells (e.g., T cells, NK cells) of the invention may be a type of vaccine for ex vivo immunization and/or in vivo therapy in a mammal. In one aspect, the mammal is a human.

[1275] With respect to ex vivo immunization, at least one of the following occurs in vitro prior to administering the cell into a mammal: i) expansion of the cells, ii) introducing a nucleic acid encoding a CAR to the cells or iii) cryopreservation of the cells.

[1276] Ex vivo procedures are well known in the art and are discussed more fully below. Briefly, cells are isolated from a mammal (e.g., a human) and genetically modified (i.e., transduced or transfected in vitro) with a vector expressing a CAR disclosed herein. The CAR-modified cell can be administered to a mammalian recipient to provide a therapeutic benefit. The mammalian recipient may be a human and the CAR-modified cell can be autologous with respect to the recipient. Alternatively, the cells can be allogeneic, syngeneic or xenogeneic with respect to the recipient.

[1277] The procedure for ex vivo expansion of hematopoietic stem and progenitor cells is described in U.S. Pat. No. 5,199,942, incorporated herein by reference, can be applied to the cells of the present invention. Other suitable methods are known in the art, therefore the present invention is not limited to any particular method of ex vivo expansion of the cells. Briefly, ex vivo culture and expansion of immune effector cells (e.g., T cells, NK cells) comprises: (1) collecting CD34+ hematopoietic stem and progenitor cells from a mammal from peripheral blood harvest or bone marrow explants; and (2) expanding such cells ex vivo. In addition to the cellular growth factors described in U.S. Pat. No. 5,199,942, other factors such as flt3-L, IL-1, IL-3 and c-kit ligand, can be used for culturing and expansion of the cells.

[1278] In addition to using a cell-based vaccine in terms of ex vivo immunization, the present invention also provides compositions and methods for in vivo immunization to elicit an immune response directed against an antigen in a patient.

[1279] Generally, the cells activated and expanded as described herein may be utilized in the treatment and prevention of diseases that arise in individuals who are immunocompromised. In particular, the CAR-modified immune effector cells (e.g., T cells, NK cells) of the invention are used in the treatment of diseases, disorders and conditions associated with expression of a cancer associate antigen as described herein. In certain aspects, the cells of the invention are used in the treatment of patients at risk for developing diseases, disorders and conditions associated with expression of a cancer associate antigen as described herein. Thus, the present invention provides methods for the treatment or prevention of diseases, disorders and conditions associated with expression of a cancer associate antigen as described herein comprising administering to a subject in need thereof, a therapeutically effective amount of the CAR-modified immune effector cells (e.g., T cells, NK cells) of the invention.

[1280] In one aspect the CAR-expressing cells of the inventions may be used to treat a proliferative disease such as a cancer or malignancy or is a precancerous condition such as a myelodysplasia, a myelodysplastic syndrome or a preleukemia. Further a disease associated with a cancer associate antigen as described herein expression include, but not limited to, e.g., atypical and/or non-classical cancers, malignancies, precancerous conditions or proliferative diseases expressing a cancer associated antigen as described herein. Non-cancer related indications associated with expression of a cancer associate antigen as described herein include, but are not limited to, e.g., autoimmune disease, (e.g., lupus), inflammatory disorders (allergy and asthma) and transplantation.

[1281] The CAR-modified immune effector cells (e.g., T cells, NK cells) of the present invention may be administered either alone, or as a pharmaceutical composition in combination with diluents and/or with other components such as IL-2 or other cytokines or cell populations.

### Hematologic Cancer

[1282] Hematological cancer conditions are the types of cancer such as leukemia, lymphoma, and malignant lymphoproliferative conditions that affect blood, bone marrow and the lymphatic system.

[1283] Leukemia can be classified as acute leukemia and chronic leukemia. Acute leukemia can be further classified as acute myelogenous leukemia (AML) and acute lymphoid leukemia (ALL). Chronic leukemia includes chronic myelogenous leukemia (CML) and chronic lymphoid leukemia (CLL). Other related conditions include myelodysplastic syndromes (MDS, formerly known as “preleukemia”) which are a diverse collection of hematological conditions united by ineffective production (or dysplasia) of myeloid blood cells and risk of transformation to AML.

[1284] Lymphoma is a group of blood cell tumors that develop from lymphocytes. Exemplary lymphomas include non-Hodgkin lymphoma and Hodgkin lymphoma.

[1285] The present invention also provides methods for inhibiting the proliferation or reducing a cancer associated antigen as described herein-expressing cell population, the methods comprising contacting a population of cells comprising a cancer associated antigen as described herein-expressing cell with a CAR-expressing T cell or NK cell of the invention that binds to the a cancer associate antigen as described herein-expressing cell. In a specific aspect, the present invention provides methods for inhibiting the proliferation or reducing the population of cancer cells expressing a cancer associated antigen as described herein, the methods comprising contacting a cancer associate antigen as described herein-expressing cancer cell population with a CAR-expressing T cell or NK cell of the invention that binds to a cancer associated antigen as described herein-expressing cell. In one aspect, the present invention provides methods for inhibiting the proliferation or reducing the population of cancer cells expressing a cancer associated antigen as described herein, the methods comprising contacting a cancer associated antigen as described herein-expressing cancer cell population with a CAR-expressing T cell or NK cell of the invention that binds to a cancer associated antigen as described herein-expressing cell. In certain aspects, a CAR-expressing T cell or NK cell of the invention reduces the quantity, number, amount or percentage of cells and/or cancer cells by at least 25%, at least 30%, at least 40%, at least 50%, at least 65%, at least 75%, at least 85%, at least 95%, or at least 99% in a subject with or animal model for myeloid leukemia or another cancer associated with a cancer associated antigen as described herein-expressing cells relative to a negative control. In one aspect, the subject is a human.

[1286] The present invention also provides methods for preventing, treating and/or managing a disease associated with a cancer associated antigen as described herein-expressing cells (e.g., a hematologic cancer or atypical cancer expressing a cancer associated antigen as described herein), the methods comprising administering to a subject in need a CART cell or NK cell of the invention that binds to a cancer associated antigen as described herein-expressing cell. In one aspect, the subject is a human. Non-limiting examples of disorders associated with a cancer associated antigen as described herein-expressing cells include autoimmune disorders (such as lupus), inflammatory disorders (such as allergies and asthma) and cancers (such as hematological cancers or atypical cancers expressing a cancer associated antigen as described herein).

[1287] The present invention also provides methods for preventing, treating and/or managing a disease associated with a cancer associated antigen as described herein-expressing cells, the methods comprising administering to a subject in need a CART cell or NK cell of the invention that binds to a cancer associated antigen as described herein-expressing cell. In one aspect, the subject is a human.

[1288] The present invention provides methods for preventing relapse of cancer associated with a cancer associated antigen as described herein-expressing cells, the methods comprising administering to a subject in need thereof aCAR T cell or NK cell of the invention that binds to a cancer associated antigen as described herein-expressing cell. In one aspect, the methods comprise administering to the subject in need thereof an effective amount of a CAR-expressing T cell or NK cell described herein that binds to a cancer associated antigen as described herein-expressing cell in combination with an effective amount of another therapy.

### Pharmaceutical Compositions and Treatments: Combinations of LSD1 Inhibitors and CAR-Expressing Cells

[1289] Pharmaceutical compositions of the present invention may comprise a CAR-expressing cell, e.g., a plurality of CAR-expressing cells, as described herein, in combination with one or more pharmaceutically or physiologically acceptable carriers, diluents or excipients. The pharmaceutical compositions may additionally comprise one or more, e.g., one LSD1 inhibitor. Such compositions may comprise buffers such as neutral buffered saline, phosphate buffered saline and the like; carbohydrates such as glucose, mannose, sucrose or dextrans, mannitol; proteins; polypeptides or amino acids such as glycine; antioxidants; chelating agents such as EDTA or glutathione; adjuvants (e.g., aluminum hydroxide); and preservatives. Compositions of the present invention are in one aspect formulated for intravenous administration.

[1290] Pharmaceutical compositions of the present invention may be administered in a manner appropriate to the disease to be treated (or prevented). The quantity and frequency of administration will be determined by such factors as the condition of the patient, and the type and severity of the patient's disease, although appropriate dosages may be determined by clinical trials.

[1291] In one embodiment, the pharmaceutical composition is substantially free of, e.g., there are no detectable levels of a contaminant, e.g., selected from the group consisting of endotoxin, mycoplasma, replication competent lentivirus (RCL), p24, VSV-G nucleic acid, HIV gag, residual anti-CD3/anti-CD28 coated beads, mouse antibodies, pooled human serum, bovine serum albumin, bovine serum, culture media components, vector packaging cell or plasmid components, a bacterium and a fungus. In one embodiment, the bacterium is at least one selected from the group consisting of Alcaligenes faecalis, Candida albicans, Escherichia coli, Haemophilus influenza, Neisseria meningitides, Pseudomonas aeruginosa, Staphylococcus aureus, Streptococcus pneumonia, and Streptococcus pyogenes group A.

[1292] When “an immunologically effective amount,” “an anti-tumor effective amount,” “a tumor-inhibiting effective amount,” or “therapeutic amount” is indicated, the precise amount of the compositions of the present invention to be administered can be determined by a physician with consideration of individual differences in age, weight, tumor size, extent of infection or metastasis, and condition of the patient (subject). It can generally be stated that a pharmaceutical composition comprising the immune effector cells (e.g., T cells, NK cells) described herein may be administered at a dosage of 10⁴ to 10⁹ cells/kg body weight, in some instances 10⁵ to 10⁶ cells/kg body weight, including all integer values within those ranges. T cell compositions may also be administered multiple times at these dosages. The cells can be administered by using infusion techniques that are commonly known in immunotherapy (see, e.g., Rosenberg et al., New Eng. J. of Med. 319:1676, 1988).

[1293] In certain aspects, it may be desired to administer activated immune effector cells (e.g., T cells, NK cells) to a subject and then subsequently redraw blood (or have an apheresis performed), activate immune effector cells (e.g., T cells, NK cells) therefrom according to the present invention, and reinfuse the patient with these activated and expanded immune effector cells (e.g., T cells, NK cells). This process can be carried out multiple times every few weeks. In certain aspects, immune effector cells (e.g., T cells, NK cells) can be activated from blood draws of from 10 cc to 400 cc. In certain aspects, immune effector cells (e.g., T cells, NK cells) are activated from blood draws of 20 cc, 30 cc, 40 cc, 50 cc, 60 cc, 70 cc, 80 cc, 90 cc, or 100 cc.

[1294] The administration of the subject compositions may be carried out in any convenient manner, including by aerosol inhalation, injection, ingestion, transfusion, implantation or transplantation. The compositions described herein may be administered to a patient trans arterially, subcutaneously, intradermally, intratumorally, intranodally, intramedullary, intramuscularly, by intravenous (i.v.) injection, or intraperitoneally. In one aspect, the T cell compositions of the present invention are administered to a patient by intradermal or subcutaneous injection. In one aspect, the T cell compositions of the present invention are administered by i.v. injection. The compositions of immune effector cells (e.g., T cells, NK cells) may be injected directly into a tumor, lymph node, or site of infection.

[1295] In a particular exemplary aspect, subjects may undergo leukapheresis, wherein leukocytes are collected, enriched, or depleted ex vivo to select and/or isolate the cells of interest, e.g., T cells. These T cell isolates may be expanded by methods known in the art and treated such that one or more CAR constructs of the invention may be introduced, thereby creating a CART cell of the invention. Subjects in need thereof may subsequently undergo standard treatment with high dose chemotherapy followed by peripheral blood stem cell transplantation. In certain aspects, following or concurrent with the transplant, subjects receive an infusion of the expanded CAR T cells of the present invention. In an additional aspect, expanded cells are administered before or following surgery.

[1296] The dosage of the above treatments to be administered to a patient will vary with the precise nature of the condition being treated and the recipient of the treatment. The scaling of dosages for human administration can be performed according to art-accepted practices. The dose for CAMPATH, for example, will generally be in the range 1 to about 100 mg for an adult patient, usually administered daily for a period between 1 and 30 days. The preferred daily dose is 1 to 10 mg per day although in some instances larger doses of up to 40 mg per day may be used (described in U.S. Pat. No. 6,120,766).

[1297] In one embodiment, the CAR is introduced into immune effector cells (e.g., T cells, NK cells), e.g., using in vitro transcription, and the subject (e.g., human) receives an initial administration of CAR immune effector cells (e.g., T cells, NK cells) of the invention, and one or more subsequent administrations of the CAR immune effector cells (e.g., T cells, NK cells) of the invention, wherein the one or more subsequent administrations are administered less than 15 days, e.g., 14, 13, 12, 11, 10, 9, 8, 7, 6, 5, 4, 3, or 2 days after the previous administration. In one embodiment, more than one administration of the CAR immune effector cells (e.g., T cells, NK cells) of the invention are administered to the subject (e.g., human) per week, e.g., 2, 3, or 4 administrations of the CAR immune effector cells (e.g., T cells, NK cells) of the invention are administered per week. In one embodiment, the subject (e.g., human subject) receives more than one administration of the CAR immune effector cells (e.g., T cells, NK cells) per week (e.g., 2, 3 or 4 administrations per week) (also referred to herein as a cycle), followed by a week of no CAR immune effector cells (e.g., T cells, NK cells) administrations, and then one or more additional administration of the CAR immune effector cells (e.g., T cells, NK cells) (e.g., more than one administration of the CAR immune effector cells (e.g., T cells, NK cells) per week) is administered to the subject. In another embodiment, the subject (e.g., human subject) receives more than one cycle of CAR immune effector cells (e.g., T cells, NK cells), and the time between each cycle is less than 10, 9, 8, 7, 6, 5, 4, or 3 days. In one embodiment, the CAR immune effector cells (e.g., T cells, NK cells) are administered every other day for 3 administrations per week. In one embodiment, the CAR immune effector cells (e.g., T cells, NK cells) of the invention are administered for at least two, three, four, five, six, seven, eight or more weeks.

[1298] In one aspect, CAR-expressing cells of the present inventions are generated using lentiviral viral vectors, such as lentivirus. Cells, e.g., CARTs, generated that way will have stable CAR expression.

[1299] In one aspect, CAR-expressing cells, e.g., CARTs, are generated using a viral vector such as a gammaretroviral vector, e.g., a gammaretroviral vector described herein. CARTs generated using these vectors can have stable CAR expression.

[1300] In one aspect, CARTs transiently express CAR vectors for 4, 5, 6, 7, 8, 9, 10, 11, 12, 13, 14, 15 days after transduction. Transient expression of CARs can be effected by RNA CAR vector delivery. In one aspect, the CAR RNA is transduced into the T cell by electroporation.

[1301] A potential issue that can arise in patients being treated using transiently expressing CAR immune effector cells (e.g., T cells, NK cells) (particularly with murine scFv bearing CARTs) is anaphylaxis after multiple treatments.

[1302] Without being bound by this theory, it is believed that such an anaphylactic response might be caused by a patient developing humoral anti-CAR response, i.e., anti-CAR antibodies having an anti-IgE isotype. It is thought that a patient's antibody producing cells undergo a class switch from IgG isotype (that does not cause anaphylaxis) to IgE isotype when there is a ten to fourteen day break in exposure to antigen.

[1303] If a patient is at high risk of generating an anti-CAR antibody response during the course of transient CAR therapy (such as those generated by RNA transductions), CART infusion breaks should not last more than ten to fourteen days.

### Methods of Making CAR-Expressing Cells

[1304] In another aspect, the invention pertains to a method of making a cell (e.g., an immune effector cell or population thereof) comprising introducing into (e.g., transducing) a cell, e.g., a T cell or a NK cell described herein, with a vector of comprising a nucleic acid encoding a CAR molecule, e.g., a CAR molecule described herein; or a nucleic acid encoding a CAR molecule e.g., a CAR described herein.

[1305] The cell in the methods is an immune effector cell (e.g., aT cell or a NK cell, or a combination thereof). In some embodiments, the cell in the methods is diaglycerol kinase (DGK) and/or Ikaros deficient.

[1306] In some embodiment, the introducing the nucleic acid molecule encoding a CAR molecule comprises transducing a vector comprising the nucleic acid molecule encoding a CAR molecule, or transfecting the nucleic acid molecule encoding a CAR molecule, wherein the nucleic acid molecule is an in vitro transcribed RNA.

[1307] In some embodiments, the method further comprises:

[1308] providing a population of immune effector cells (e.g., T cells or NK cells); and

[1309] removing T regulatory cells from the population, thereby providing a population of T regulatory-depleted cells;

[1310] wherein steps a) and b) are performed prior to introducing the nucleic acid encoding the CAR molecule to the population.

[1311] In embodiments of the methods, the T regulatory cells comprise CD25+ T cells, and are removed from the cell population using an anti-CD25 antibody, or fragment thereof. The anti-CD25 antibody, or fragment thereof, can be conjugated to a substrate, e.g., a bead.

[1312] In other embodiments, the population of T regulatory-depleted cells provided from step (b) contains less than 30%, 25%, 20%, 15%, 10%, 5%, 4%, 3%, 2%, 1% of CD25+ cells.

[1313] In yet other embodiments, the method further comprises removing cells from the population which express a tumor antigen that does not comprise CD25 to provide a population of T regulatory-depleted and tumor antigen depleted cells prior to introducing the nucleic acid encoding a CAR molecule to the population. The tumor antigen can be selected from CD19, CD30, CD38, CD123, CD20, CD14 or CD11b, or a combination thereof.

[1314] In other embodiments, the method further comprises removing cells from the population which express a checkpoint inhibitor, to provide a population of T regulatory-depleted and inhibitory molecule depleted cells prior to introducing the nucleic acid encoding a CAR molecule to the population. The checkpoint inhibitor can be chosen from PD-1, LAG-3, TIM3, B7-H1, CD160, P1H, 2B4, CEACAM (e.g., CEACAM-1, CEACAM-3, and/or CEACAM-5), TIGIT, CTLA-4, BTLA, and LAIR1.

[1315] Further embodiments disclosed herein encompass providing a population of immune effector cells. The population of immune effector cells provided can be selected based upon the expression of one or more of CD3, CD28, CD4, CD8, CD45RA, and/or CD45RO. In certain embodiments, the population of immune effector cells provided are CD3+ and/or CD28+.

[1316] In certain embodiments of the method, the method further comprises expanding the population of cells after the nucleic acid molecule encoding a CAR molecule has been introduced.

[1317] In embodiments, the population of cells is expanded for a period of 8 days or less.

[1318] In certain embodiments, the population of cells is expanded in culture for 5 days, and the resulting cells are more potent than the same cells expanded in culture for 9 days under the same culture conditions.

[1319] In other embodiments, the population of cells is expanded in culture for 5 days show at least a one, two, three or four fold increase in cell doublings upon antigen stimulation as compared to the same cells expanded in culture for 9 days under the same culture conditions.

[1320] In yet other embodiments, the population of cells is expanded in culture for 5 days, and the resulting cells exhibit higher proinflammatory IFN-γ and/or GM-CSF levels, as compared to the same cells expanded in culture for 9 days under the same culture conditions.

[1321] In other embodiments, the population of cells is expanded by culturing the cells in the presence of an agent that stimulates a CD3/TCR complex associated signal and/or a ligand that stimulates a costimulatory molecule on the surface of the cells. The agent can be a bead conjugated with anti-CD3 antibody, or a fragment thereof, and/or anti-CD28 antibody, or a fragment thereof.

[1322] In other embodiments, the population of cells is expanded in an appropriate media that includes one or more interleukin that result in at least a 200-fold, 250-fold, 300-fold, or 350-fold increase in cells over a 14 day expansion period, as measured by flow cytometry.

[1323] In other embodiments, the population of cells is expanded in the presence IL-15 and/or IL-7.

[1324] In certain embodiments, the method further includes cryopreserving he population of the cells after the appropriate expansion period.

[1325] In yet other embodiments, the method of making disclosed herein further comprises contacting the population of immune effector cells with a nucleic acid encoding a telomerase subunit, e.g., hTERT. The nucleic acid encoding the telomerase subunit can be DNA.

[1326] The present invention also provides a method of generating a population of RNA-engineered cells, e.g., cells described herein, e.g., immune effector cells (e.g., T cells, NK cells), transiently expressing exogenous RNA. The method comprises introducing an in vitro transcribed RNA or synthetic RNA into a cell, where the RNA comprises a nucleic acid encoding a CAR molecule described herein.

[1327] In another aspect, the invention pertains to a method of providing an anti-tumor immunity in a subject comprising administering to the subject an effective amount of a cell comprising a CAR molecule, e.g., a cell expressing a CAR molecule described herein. In one embodiment, the cell is an autologous T cell or NK cell. In one embodiment, the cell is an allogeneic T cell or NK cell. In one embodiment, the subject is a human.

[1328] In one aspect, the invention includes a population of autologous cells that are transfected or transduced with a vector comprising a nucleic acid molecule encoding a CAR molecule, e.g., as described herein. In one embodiment, the vector is a retroviral vector. In one embodiment, the vector is a self-inactivating lentiviral vector as described elsewhere herein. In one embodiment, the vector is delivered (e.g., by transfecting or electroporating) to a cell, e.g., a T cell or a NK cell, wherein the vector comprises a nucleic acid molecule encoding a CAR of the present invention as described herein, which is transcribed as an mRNA molecule, and the CARs of the present invention is translated from the RNA molecule and expressed on the surface of the cell.

[1329] In another aspect, the present invention provides a population of CAR-expressing cells, e.g., CAR-expressing immune effector cells (e.g., T cells or NK cells). In some embodiments, the population of CAR-expressing cells comprises a mixture of cells expressing different CARs. For example, in one embodiment, the population of CAR-expressing immune effector cells (e.g., T cells or NK cells) can include a first cell expressing a CAR having an antigen binding domain that binds to a first tumor antigen as described herein, and a second cell expressing a CAR having a different antigen binding domain that binds to a second tumor antigen as described herein. As another example, the population of CAR-expressing cells can include a first cell expressing a CAR that includes an antigen binding domain that binds to a tumor antigen as described herein, and a second cell expressing a CAR that includes an antigen binding domain to a target other than a tumor antigen as described herein. In one embodiment, the population of CAR-expressing cells includes, e.g., a first cell expressing a CAR that includes a primary intracellular signaling domain, and a second cell expressing a CAR that includes a secondary signaling domain, e.g., a costimulatory signaling domain.

[1330] In another aspect, the present invention provides a population of cells wherein at least one cell in the population expresses a CAR having an antigen binding domain that binds to a tumor antigen as described herein, and a second cell expressing another agent, e.g., an agent which enhances the activity of a CAR-expressing cell. For example, in one embodiment, the agent can be an agent which inhibits an inhibitory molecule. Examples of inhibitory molecules include PD-1, PD-L1, CTLA-4, TIM-3, CEACAM (e.g., CEACAM-1, CEACAM-3 and/or CEACAM-5), LAG-3, VISTA, BTLA, TIGIT, LAIR1, CD160, 2B4 and TGF beta. In one embodiment, the agent which inhibits an inhibitory molecule, e.g., is a molecule described herein, e.g., an agent that comprises a first polypeptide, e.g., an inhibitory molecule, associated with a second polypeptide that provides a positive signal to the cell, e.g., an intracellular signaling domain described herein. In one embodiment, the agent comprises a first polypeptide, e.g., of an inhibitory molecule such as PD-1, LAG-3, CTLA-4, CD160, BTLA, LAIR1, TIM-3, CEACAM (e.g., CEACAM-1, CEACAM-3 and/or CEACAM-5), 2B4 and TIGIT, or a fragment of any of these, and a second polypeptide which is an intracellular signaling domain described herein (e.g., comprising a costimulatory domain (e.g., 41BB, CD27 or CD28, e.g., as described herein) and/or a primary signaling domain (e.g., a CD3 zeta signaling domain described herein). In one embodiment, the agent comprises a first polypeptide of PD-1 or a fragment thereof, and a second polypeptide of an intracellular signaling domain described herein (e.g., a CD28, CD27, OX40 or 4-IBB signaling domain described herein and/or a CD3 zeta signaling domain described herein).

[1331] In one embodiment, the nucleic acid molecule encoding a CAR of the present invention molecule, e.g., as described herein, is expressed as an mRNA molecule. In one embodiment, the genetically modified CAR of the present invention-expressing cells, e.g., immune effector cells (e.g., T cells, NK cells), can be generated by transfecting or electroporating an RNA molecule encoding the desired CARs (e.g., without a vector sequence) into the cell. In one embodiment, a CAR of the present invention molecule is translated from the RNA molecule once it is incorporated and expressed on the surface of the recombinant cell.

[1332] A method for generating mRNA for use in transfection involves in vitro transcription (IVT) of a template with specially designed primers, followed by polyA addition, to produce a construct containing 3′ and 5′ untranslated sequence (“UTR”) (e.g., a 3′ and/or 5′ UTR described herein), a 5′ cap (e.g., a 5′ cap described herein) and/or Internal Ribosome Entry Site (IRES) (e.g., an IRES described herein), the nucleic acid to be expressed, and a polyA tail, typically 50-2000 bases in length (SEQ ID NO:32). RNA so produced can efficiently transfect different kinds of cells. In one embodiment, the template includes sequences for the CAR. In an embodiment, an RNA CAR vector is transduced into a cell, e.g., a T cell or a NK cell, by electroporation.

TABLE 18
Sequences of various components of CAR (aa—amino acids,
na—nucleic acids that encodes the corresponding protein)

| SEQ | | |
|---|---|---|
| ID NO | description | Sequence |
| 1 | EF-1 | CGTGAGGCTCCGGTGCCCGTCAGTGGGCAGAGCGCACATCGCCCAC |
| | promoter | AGTCCCCGAGAAGTTGGGGGGAGGGGTCGGCAATTGAACCGGTGC |
| | | CTAGAGAAGGTGGCGCGGGGTAAACTGGGAAAGTGATGTCGTGTA |
| | | CTGGCTCCGCCTTTTTCCCGAGGGTGGGGGAGAACCGTATATAAGT |
| | | GCAGTAGTCGCCGTGAACGTTCTTTTTCGCAACGGGTTTGCCGCCAG |
| | | AACACAGGTAAGTGCCGTGTGTGGTTCCCGCGGGCCTGGCCTCTTTA |
| | | CGGGTTATGGCCCTTGCGTGCCTTGAATTACTTCCACCTGGCTGCAG |
| | | TACGTGATTCTTGATCCCGAGCTTCGGGTTGGAAGTGGGTGGGAGA |
| | | GTTCGAGGCCTTGCGCTTAAGGAGCCCCTTCGCCTCGTGCTTGAGTT |
| | | GAGGCCTGGCCTGGGCGCTGGGGCCGCCGCGTGCGAATCTGGTGG |
| | | CACCTTCGCGCCTGTCTCGCTGCTTTCGATAAGTCTCTAGCCATTTAA |
| | | AATTTTTGATGACCTGCTGCGACGCTTTTTTTCTGGCAAGATAGTCTT |
| | | GTAAATGCGGGCCAAGATCTGCACACTGGTATTTCGGTTTTTGGGGC |
| | | CGCGGGCGGCGACGGGGCCCGTGCGTCCCAGCGCACATGTTCGGC |
| | | GAGGCGGGGCCTGCGAGCGCGGCCACCGAGAATCGGACGGGGGTA |
| | | GTCTCAAGCTGGCCGGCCTGCTCTGGTGCCTGGCCTCGCGCCGCCGT |
| | | GTATCGCCCCGCCCTGGGCGGCAAGGCTGGCCCGGTCGGCACCAGT |
| | | TGCGTGAGCGGAAAGATGGCCGCTTCCCGGCCCTGCTGCAGGGAGC |
| | | TCAAAATGGAGGACGCGGCGCTCGGGAGAGCGGGCGGGTGAGTCA |
| | | CCCACACAAAGGAAAAGGGCCTTTCCGTCCTCAGCCGTCGCTTCATG |
| | | TGACTCCACGGAGTACCGGGCGCCGTCCAGGCACCTCGATTAGTTCT |
| | | CGAGCTTTTGGAGTACGTCGTCTTTAGGTTGGGGGGAGGGGTTTTAT |
| | | GCGATGGAGTTTCCCCACACTGAGTGGGTGGAGACTGAAGTTAGGC |
| | | CAGCTTGGCACTTGATGTAATTCTCCTTGGAATTTGCCCTTTTTGAGT |
| | | TTGGATCTTGGTTCATTCTCAAGCCTCAGACAGTGGTTCAAAGTTTTT |
| | | TTCTTCCATTTCAGGTGTCGTGA |
| 2 | Leader (aa) | MALPVTALLLPLALLLHAARP |
| 3 | Leader (na) | ATGGCCCTGCCTGTGACAGCCCTGCTGCTGCCTCTGGCTCTGCTGCT |
| | | GCATGCCGCTAGACCC |
| 1938 | Leader (na) | ATGGCCCTCCCTGTCACCGCCCTGCTGCTTCCGCTGGCTCTTCTGCTC |
| | | CACGCCGCTCGGCCC |
| 4 | CD 8 hinge | TTTPAPRPPTPAPTIASQPLSLRPEACRPAAGGAVHTRGLDFACD |
| | (aa) | |
| 5 | CD8 hinge | ACCACGACGCCAGCGCCGCGACCACCAACACCGGCGCCCACCATCG |
| | (na) | CGTCGCAGCCCCTGTCCCTGCGCCCAGAGGCGTGCCGGCCAGCGGC |
| | | GGGGGGCGCAGTGCACACGAGGGGGCTGGACTTCGCCTGTGAT |
| 6 | Ig4 hinge | ESKYGPPCPPCPAPEFLGGPSVFLFPPKPKDTLMISRTPEVTCVVVDVSQ |
| | (aa) | EDPEVQFNWYVDGVEVHNAKTKPREEQFNSTYRVVSVLTVLHQDWLN |
| | | GKEYKCKVSNKGLPSSIEKTISKAKGQPREPQVYTLPPSQEEMTKNQVSL |
| | | TCLVKGFYPSDIAVEWESNGQPENNYKTTPPVLDSDGSFFLYSRLTVDKS |
| | | RWQEGNVFSCSVMHEALHNHYTQKSLSLSLGKM |
| 7 | Ig4 hinge | GAGAGCAAGTACGGCCCTCCCTGCCCCCCTTGCCCTGCCCCCGAGTT |
| | (na) | CCTGGGCGGACCCAGCGTGTTCCTGTTCCCCCCCAAGCCCAAGGACA |
| | | CCCTGATGATCAGCCGGACCCCCGAGGTGACCTGTGTGGTGGTGGA |
| | | CGTGTCCCAGGAGGACCCCGAGGTCCAGTTCAACTGGTACGTGGAC |
| | | GGCGTGGAGGTGCACAACGCCAAGACCAAGCCCCGGGAGGAGCAG |
| | | TTCAATAGCACCTACCGGGTGGTGTCCGTGCTGACCGTGCTGCACCA |
| | | GGACTGGCTGAACGGCAAGGAATACAAGTGTAAGGTGTCCAACAAG |
| | | GGCCTGCCCAGCAGCATCGAGAAAACCATCAGCAAGGCCAAGGGCC |
| | | AGCCTCGGGAGCCCCAGGTGTACACCCTGCCCCCTAGCCAAGAGGA |
| | | GATGACCAAGAACCAGGTGTCCCTGACCTGCCTGGTGAAGGGCTTCT |
| | | ACCCCAGCGACATCGCCGTGGAGTGGGAGAGCAACGGCCAGCCCG |
| | | AGAACAACTACAAGACCACCCCCCCTGTGCTGGACAGCGACGGCAG |
| | | CTTCTTCCTGTACAGCCGGCTGACCGTGGACAAGAGCCGGTGGCAG |
| | | GAGGGCAACGTCTTTAGCTGCTCCGTGATGCACGAGGCCCTGCACA |
| | | ACCACTACACCCAGAAGAGCCTGAGCCTGTCCCTGGGCAAGATG |
| 8 | IgD hinge | RWPESPKAQASSVPTAQPQAEGSLAKATTAPATTRNTGRGGEEKKKEK |
| | (aa) | EKEEQEERETKTPECPSHTQPLGVYLLTPAVQDLWLRDKATFTCFVVGS |
| | | DLKDAHLTWEVAGKVPTGGVEEGLLERHSNGSQSQHSRLTLPRSLWN |
| | | AGTSVTCTLNHPSLPPQRLMALREPAAQAPVKLSLNLLASSDPPEAASW |
| | | LLCEVSGFSPPNILLMWLEDQREVNTSGFAPARPPPQPGSTTFWAWSV |
| | | LRVPAPPSPQPATYTCVVSHEDSRTLLNASRSLEVSYVTDH |
| 9 | IgD hinge | AGGTGGCCCGAAAGTCCCAAGGCCCAGGCATCTAGTGTTCCTACTGC |
| | (na) | ACAGCCCCAGGCAGAAGGCAGCCTAGCCAAAGCTACTACTGCACCT |
| | | GCCACTACGCGCAATACTGGCCGTGGCGGGGAGGAGAAGAAAAAG |
| | | GAGAAAGAGAAAGAAGAACAGGAAGAGAGGGAGACCAAGACCCCT |
| | | GAATGTCCATCCCATACCCAGCCGCTGGGCGTCTATCTCTTGACTCCC |
| | | GCAGTACAGGACTTGTGGCTTAGAGATAAGGCCACCTTTACATGTTT |
| | | CGTCGTGGGCTCTGACCTGAAGGATGCCCATTTGACTTGGGAGGTT |
| | | GCCGGAAAGGTACCCACAGGGGGGGTTGAGGAAGGGTTGCTGGAG |
| | | CGCCATTCCAATGGCTCTCAGAGCCAGCACTCAAGACTCACCCTTCC |
| | | GAGATCCCTGTGGAACGCCGGGACCTCTGTCACATGTACTCTAAATC |
| | | ATCCTAGCCTGCCCCCACAGCGTCTGATGGCCCTTAGAGAGCCAGCC |
| | | GCCCAGGCACCAGTTAAGCTTAGCCTGAATCTGCTCGCCAGTAGTGA |
| | | TCCCCCAGAGGCCGCCAGCTGGCTCTTATGCGAAGTGTCCGGCTTTA |
| | | GCCCGCCCAACATCTTGCTCATGTGGCTGGAGGACCAGCGAGAAGT |
| | | GAACACCAGCGGCTTCGCTCCAGCCCGGCCCCCACCCCAGCCGGGTT |
| | | CTACCACATTCTGGGCCTGGAGTGTCTTAAGGGTCCCAGCACCACCT |
| | | AGCCCCCAGCCAGCCACATACACCTGTGTTGTGTCCCATGAAGATAG |
| | | CAGGACCCTGCTAAATGCTTCTAGGAGTCTGGAGGTTTCCTACGTGA |
| | | CTGACCATT |
| 10 | GS | GGGGSGGGGS |
| | hinge/linker | |
| | (aa) | |
| 11 | GS | GGTGGCGGAGGTTCTGGAGGTGGAGGTTCC |
| | hinge/linker | |
| | (na) | |
| 12 | CD8 TM (aa) | IYIWAPLAGTCGVLLLSLVITLYC |
| 13 | CD8 TM (na) | ATCTACATCTGGGCGCCCTTGGCCGGGACTTGTGGGGTCCTTCTCCT |
| | | GTCACTGGTTATCACCCTTTACTGC |
| 1939 | CD8 TM (na) | ATCTACATTTGGGCCCCTCTGGCTGGTACTTGCGGGGTCCTGCTGCTT |
| | | TCACTCGTGATCACTCTTTACTGT |
| 14 | 4-1BB | KRGRKKLLYIFKQPFMRPVQTTQEEDGCSCRFPEEEEGGCEL |
| | intracellular | |
| | domain (aa) | |
| 15 | 4-1BB | AAACGGGGCAGAAAGAAACTCCTGTATATATTCAAACAACCATTTAT |
| | intracellular | GAGACCAGTACAAACTACTCAAGAGGAAGATGGCTGTAGCTGCCGA |
| | domain (na) | TTTCCAGAAGAAGAAGAAGGAGGATGTGAACTG |
| 1940 | 4-1BB | AAGCGCGGTCGGAAGAAGCTGCTGTACATCTTTAAGCAACCCTTCAT |
| | intracellular | GAGGCCTGTGCAGACTACTCAAGAGGAGGACGGCTGTTCATGCCGG |
| | domain (na) | TTCCCAGAGGAGGAGGAAGGCGGCTGCGAACTG |
| 16 | CD27 (aa) | QRRKYRSNKGESPVEPAEPCRYSCPREEEGSTIPIQEDYRKPEPACSP |
| 17 | CD27 (na) | AGGAGTAAGAGGAGCAGGCTCCTGCACAGTGACTACATGAACATGA |
| | | CTCCCCGCCGCCCCGGGCCCACCCGCAAGCATTACCAGCCCTATGCC |
| | | CCACCACGCGACTTCGCAGCCTATCGCTCC |
| 18 | CD3-zeta | RVKFSRSADAPAYKQGQNQLYNELNLGRREEYDVLDKRRGRDPEMGG |
| | (aa) | KPRRKNPQEGLYNELQKDKMAEAYSEIGMKGERRRGKGHDGLYQGLS |
| | | TATKDTYDALHMQALPPR |
| 19 | CD3-zeta | AGAGTGAAGTTCAGCAGGAGCGCAGACGCCCCCGCGTACAAGCAG |
| | (na) | GGCCAGAACCAGCTCTATAACGAGCTCAATCTAGGACGAAGAGAGG |
| | | AGTACGATGTTTTGGACAAGAGACGTGGCCGGGACCCTGAGATGGG |
| | | GGGAAAGCCGAGAAGGAAGAACCCTCAGGAAGGCCTGTACAATGA |
| | | ACTGCAGAAAGATAAGATGGCGGAGGCCTACAGTGAGATTGGGAT |
| | | GAAAGGCGAGCGCCGGAGGGGCAAGGGGCACGATGGCCTTTACCA |
| | | GGGTCTCAGTACAGCCACCAAGGACACCTACGACGCCCTTCACATGC |
| | | AGGCCCTGCCCCCTCGC |
| 1941 | CD3-zeta | CGCGTGAAATTCAGCCGCAGCGCAGATGCTCCAGCCTACAAGCAGG |
| | (na) | GGCAGAACCAGCTCTACAACGAACTCAATCTTGGTCGGAGAGAGGA |
| | | GTACGACGTGCTGGACAAGCGGAGAGGACGGGACCCAGAAATGGG |
| | | CGGGAAGCCGCGCAGAAAGAATCCCCAAGAGGGCCTGTACAACGA |
| | | GCTCCAAAAGGATAAGATGGCAGAAGCCTATAGCGAGATTGGTATG |
| | | AAAGGGGAACGCAGAAGAGGCAAAGGCCACGACGGACTGTACCAG |
| | | GGACTCAGCACCGCCACCAAGGACACCTATGACGCTCTTCACATGCA |
| | | GGCCCTGCCGCCTCGG |
| 20 | CD3-zeta | RVKFSRSADAPAYQQGQNQLYNELNLGRREEYDVLDKRRGRDPEMGG |
| | (aa) | KPRRKNPQEGLYNELQKDKMAEAYSEIGMKGERRRGKGHDGLYQGLS |
| | | TATKDTYDALHMQALPPR |
| 21 | CD3-zeta | AGAGTGAAGTTCAGCAGGAGCGCAGACGCCCCCGCGTACCAGCAG |
| | (na) | GGCCAG |
| | | AACCAGCTCTATAACGAGCTCAATCTAGGACGAAGAGAGGAGTACG |
| | | ATGTTT |
| | | TGGACAAGAGACGTGGCCGGGACCCTGAGATGGGGGGAAAGCCGA |
| | | GAAGGA |
| | | AGAACCCTCAGGAAGGCCTGTACAATGAACTGCAGAAAGATAAGAT |
| | | GGCGG |
| | | AGGCCTACAGTGAGATTGGGATGAAAGGCGAGCGCCGGAGGGGCA |
| | | AGGGGC |
| | | ACGATGGCCTTTACCAGGGTCTCAGTACAGCCACCAAGGACACCTAC |
| | | GACGC |
| | | CCTTCACATGCAGGCCCTGCCCCCTCGC |
| 22 | linker | GGGGS |
| 23 | linker | GGTGGCGGAGGTTCTGGAGGTGGAGGTTCC |
| 24 | PD-1 | Pgwfldspdrpwnpptfspallvvtegdnatftcsfsntsesfvlnwyrmspsnqtdkl |
| | extracellular | aafpedrsqpgqdcrfrvtqlpngrdfhmsvvrarrndsgtylcgaislapkaqikeslra |
| | domain (aa) | elrvterraevptahpspsprpagqfqtlv |
| 25 | PD-1 | Cccggatggtttctggactctccggatcgcccgtggaatcccccaaccttctcaccggcact |
| | extracellular | cttggttgtgactgagggcgataatgcgaccttcacgtgctcgttctccaacacctccgaat |
| | domain (na) | cattcgtgctgaactggtaccgcatgagcccgtcaaaccagaccgacaagctcgccgcgtt |
| | | tccggaagatcggtcgcaaccgggacaggattgtcggttccgcgtgactcaactgccgaat |
| | | ggcagagacttccacatgagcgtggtccgcgctaggcgaaacgactccgggacctacctg |
| | | tgcggagccatctcgctggcgcctaaggcccaaatcaaagagagcttgagggccgaactg |
| | | agagtgaccgagcgcagagctgaggtgccaactgcacatccatccccatcgcctcggcct |
| | | gcggggcagtttcagaccctggtc |
| 26 | PD-1 CAR | Malpvtalllplalllhaarppgwfldspdrpwnpptfspallvvtegdnatftcsfsntse |
| | (aa) with | sfvlnwyrmspsnqtdklaafpedrsqpgqdcrfrvtqlpngrdfhmsvvrarrndsgt |
| | signal | ylcgaislapkaqikeslraelrvterraevptahpspsprpagqfqtlvtttpaprpptpa |
| | | ptiasqplslrpeacrpaaggavhtrgldfacdiyiwaplagtcgvlllslvitlyckrgrkklly |
| | | ifkqpfmrpvqttqeedgcscrfpeeeeggcelrvkfsrsadapaykqgqnqlynelnl |
| | | grreeydvldkrrgrdpemggkprrknpqeglynelqkdkmaeayseigmkgerrrg |
| | | kghdglyqglstatkdtydalhmqalppr |
| 27 | PD-1 CAR | Atggccctccctgtcactgccctgcttctccccctcgcactcctgctccacgccgctagacca |
| | (na) | cccggatggtttctggactctccggatcgcccgtggaatcccccaaccttctcaccggcact |
| | | cttggttgtgactgagggcgataatgcgaccttcacgtgctcgttctccaacacctccgaat |
| | | cattcgtgctgaactggtaccgcatgagcccgtcaaaccagaccgacaagctcgccgcgtt |
| | | tccggaagatcggtcgcaaccgggacaggattgtcggttccgcgtgactcaactgccgaat |
| | | ggcagagacttccacatgagcgtggtccgcgctaggcgaaacgactccgggacctacctg |
| | | tgcggagccatctcgctggcgcctaaggcccaaatcaaagagagcttgagggccgaactg |
| | | agagtgaccgagcgcagagctgaggtgccaactgcacatccatccccatcgcctcggcct |
| | | gcggggcagtttcagaccctggtcacgaccactccggcgccgcgcccaccgactccggcc |
| | | ccaactatcgcgagccagcccctgtcgctgaggccggaagcatgccgccctgccgccgga |
| | | ggtgctgtgcatacccggggattggacttcgcatgcgacatctacatttgggctcctctcgc |
| | | cggaacttgtggcgtgctccttctgtccctggtcatcaccctgtactgcaagcggggtcgga |
| | | aaaagcttctgtacattttcaagcagcccttcatgaggcccgtgcaaaccacccaggagga |
| | | ggacggttgctcctgccggttccccgaagaggaagaaggaggttgcgagctgcgcgtgaa |
| | | gttctcccggagcgccgacgcccccgcctataagcagggccagaaccagctgtacaacga |
| | | actgaacctgggacggcgggaagagtacgatgtgctggacaagcggcgcggccgggacc |
| | | ccgaaatgggcgggaagcctagaagaaagaaccctcaggaaggcctgtataacgagctg |
| | | cagaaggacaagatggccgaggcctactccgaaattgggatgaagggagagcggcgga |
| | | ggggaaaggggcacgacggcctgtaccaaggactgtccaccgccaccaaggacacatac |
| | | gatgccctgcacatgcaggcccttccccctcgc |
| 28 | linker | (Gly-Gly-Gly-Ser)n, where n = 1-10 |
| 29 | linker | (Gly4 Ser)4 |
| 30 | linker | (Gly4 Ser)3 |
| 31 | linker | (Gly3Ser) |
| 39 | PD1 CAR | Pgwfldspdrpwnpptfspallvvtegdnatftcsfsntsesfvlnwvrmspsnqtdkl |
| | (aa) | aafpedrsqpgqdcrfrvtqlpngrdfhmsvvrarrndsgtvlcgaislapkaqikeslra |
| | | elrvterraevptahpspsprpagqfqtlvtttpaprpptpaptiasqplslrpeacrpaa |
| | | ggavhtrgldfacdiyiwaplagtcgvlllslvitlyckrgrkkllyifkqpfmrpvqttqeed |
| | | gcscrfpeeeeggcelrvkfsrsadapaykqgqnqlynelnlgrreeydvldkrrgrdpe |
| | | mggkprrknpqeglynelqkdkmaeayseigmkgerrrgkghdglyqglstatkdty |
| | | dalhmqalppr |

### EXAMPLES

### Example 1

[1333] Identification of genes important in naive T cell, e.g., T_{SCM} cell, proliferation and expansion. Next generation sequencing on T cells transduced with a barcoded shRNA library was conducted to find genes that, when inhibited through shRNA, promoted the expansion of naive T cells, e.g., m T_{SCM} cells. On target, LSD1, emerged as a gene which, when inhibited, resulted in a more naive T cell phenotype. The effects of LSD1 inhibition on T cell, e.g., CART cell, phenotype and/or function were investigated further, as described below.

### FL-LSD1 LC-MS Assay

[1334] Representative compounds of the present disclosure were serially and separately diluted 3-fold in DMSO to obtain a total of twelve concentrations. Then the test compounds at each concentration (100 nL of each) were transferred into a 384-well Perkin Elmer ProxiPlate 384 plus plates by Mosquito™ Solutions (5 μL) of 0.8 nM, the full-length LSD1 and 0.5 μM FAD in reaction buffer (40 mM Tris-HCl, 0.01% Triton-X100.10 mM KCl, 1 mM DTT) were added into the wells and then incubated with the test compound for 30 min. A 5 μL solution of 1 μM of the peptide substrate H3K4me1 (histone H3[1-21]-biotin) in reaction buffer was added to each initiate reaction. The final components in the reaction solution include 0.4 nM FL-LSD1, 0.25 μM FAD, and 0.5 μM H3K4me1 peptide with varying concentration of the compounds. A positive control consisted of the enzyme, 0.25 μM FAD and 0.5 μM substrate in the absence of the test compound, and a negative control consisted of 0.5 μM substrate only. Each reaction was incubated at room temperature for 60 min, and then stopped by the addition of 3 μL quench solution (2.5% TFA with 320 nM d4-SAH). The reaction mixture was centrifuged (Eppendorf centrifuge 5810, Rotor A-4-62) for 1 min at 2000 rpm and read on an API 4000 triple quadrupole mass spec with Turbulon Spray (Applied Biosystem) coupled with Prominence UFLC (Shimadzu). The conversion ratio of H3K4me1 substrate to the H3K4me0 product was calculated by dividing the peak area of the H3K4me0 peptide by the total peak area of all those two peptides on the assumption that the ionization efficiency of those peptides is the same. The data were then fit to a dose response equation using the program Helios to get the IC50 values of the test compound. IC50 values determined according to this method are presented in Table 3.

### Example 2

### Preparation of 5-(6-chloro-4′-(methylsulfonyl)biphenyl-3-yl)-2-(piperazin-1-yl)-1H-pyrrole-3-carbonitrile (1)

[chemical structure]

### Preparation of Intermediate 2-bromo-1-(3-bromo-4-chlorophenyl)ethanone (1b)

[chemical structure]

[1337] To a solution of 1-(3-bromo-4-chlorophenyl)ethanone (0.4 g, 1.713 mmol) (1a) in mixture of EtOAc (10 mL) and CHCl₃ (10.00 ml) was added copper(II) bromide (0.689 g, 3.08 mmol). The reaction mixture was heated at reflux and stirred for 3 h. After cooling to rt, the mixture was added with 10 mL of NH₄Cl(aq), and extracted with EtOAc (20 mL×2). The combined organic phase was washed with brine (20 mL), dried over Na₂SO₄ (anhydrous), filtered and concentrated under reduced pressure. The residue was purified by flash chromatography(EA/PE=0:100-3:100) to give the title compound (0.23 g, 50%). ¹H NMR (400 MHz, CDCl₃) δ ppm 4.39 (s, 2H), 7.52-7.65 (m, 1H), 7.79-7.96 (m, 1H), 8.14-8.37 (m, 1H).

### Preparation of Intermediate tert-butyl 4-(5-(3-bromo-4-chlorophenyl)-3-cyano-1H-pyrrol-2-yl)piperazine-1-carboxylate (1c)

[chemical structure]

[1339] To a solution of (E)-tert-butyl 4-(1-amino-2-cyanovinyl)piperazine-1-carboxylate (242 mg, 0.960 mmol) in anhydrous EtOH (6 ml) was added 2-bromo-1-(3-bromo-4-chlorophenyl)ethanone (300 mg, 0.960 mmol) (1b) and sodium hydrogencarbonate (323 mg, 3.84 mmol). The reaction mixture was heated at reflux and stirred for 3 h. After cooling to rt, the mixture was diluted with 10 mL of NH₄Cl(aq), and extracted with EtOAc (20 mL×2). The combined organic phase was washed with brine (30 mL), dried over Na₂SO₄ (anhydrous), filtered and concentrated under reduced pressure. The residue was purified by flash chromatography(EA/PE=0:100-20:80) to give the title compound (180 mg, 36%). LC-MS: [M+H]⁺ =467.0.

### Preparation of Intermediate tert-butyl 4-(5-(6-chloro-4′-(methylsulfonyl)biphenyl-3-yl)-3-cyano-1H-pyrrol-2-yl)piperazine-1-carboxylate (1d)

[chemical structure]

[1341] To a solution of tert-butyl 4-(5-(3-bromo-4-chlorophenyl)-3-cyano-1H-pyrrol-2-yl)piperazine-1-carboxylate (50 mg, 0.107 mmol) (1c) in mixture of H₂O (0.050 ml) and n-propanol (0.5 ml) was added 4-(methylsulfonyl)phenylboronic acid (42.9 mg, 0.215 mmol), PdCl₂(PPh₃) (7.56 mg, 10.73 μmop, Na₂CO₃ (28.4 mg, 0.268 mmol). The reaction mixture was heated at 100° C. for 1 h under N₂ with microwave. After cooling to rt, the mixture was diluted with 5 mL of NH₄Cl(aq), and extracted with EtOAc (10 mL×2). The combined organic phase was washed with brine (10 mL), dried over Na₂SO₄ (anhydrous), filtered and concentrated under reduced pressure. The residue was purified by flash chromatography (EA/PE=0:100-35:65) to give the title compound (40 mg, 62%). ¹H NMR (400 MHz, CDCl₃) δ ppm 1.47 (s, 9H), 3.08 (s, 3H), 3.33 (br s., 4H), 3.53 (t, J=4.89 Hz, 4H), 6.26-6.67 (m, 1H), 7.38-7.53 (m, 3H), 7.66 (d, J=8.28 Hz, 2H), 7.92 (d, J=8.28 Hz, 2H), 8.87-9.05 (m, 1H).

### Preparation of 5-(6-chloro-4′-(methylsulfonyl)biphenyl-3-yl)-2-(piperazin-1-yl)-1H-pyrrole-3-carbonitrile (1)

[chemical structure]

[1343] A mixture of tert-butyl 4-(5-(6-chloro-4′-(methylsulfonyl)biphenyl-3-yl)-3-cyano-1H-pyrrol-2-yl)piperazine-1-carboxylate (1d) (30 mg, 0.055 mmol) and HCl in EtOAc (2 ml, 2.000 mmol) was stirred at 25° C. for 1 h. The precipitate was filtered and washed by EtOAc to afford desired product (25 mg, 97%). ¹H NMR (400 MHz, MeOD-d₄) δ ppm 3.20 (s, 3H), 3.39-3.42 (m, 4H), 3.64-3.66 (m, 4H), 6.67 (s, 1H), 7.53 (d, J=8.68 Hz, 1H), 7.60-7.63 (m, 2H), 7.74-7.76 (m, 2H), 8.06 (d, J=8.20 Hz, 2H). LC-MS: [M+H]⁺=441.1.

### Example 3

### Preparation of N,N-dimethyl-1-((4-(4-(4-(piperidin-4-yl)phenyl)-1H-indazol-1-yl)phenyl)sulfonyl)piperidin-4-amine (2)

[chemical structure]

### Preparation of Intermediate tert-butyl 4-(4-(4,4,5,5-tetramethyl-1,3,2-dioxaborolan-2-yl)phenyl)piperidine-1-carboxylate (2a)

[chemical structure]

[1346] A mixture of tert-butyl 4-(4-bromophenyl) piperidine-1-carboxylate (510 mg, 1.499 mmol), 4,4,4′,4′,5,5,5′,5′-octamethyl-2,2′-bi(1,3,2-dioxaborolane) (761 mg, 3 mmol) and KOAc (441 mg, 4.5 mmol) in DME (20 ml) was degassed with N₂ and PdCl₂(dppf)-CH₂Cl₂ (122 mg, 0.15 mmol) was added. The resulting mixture was degassed with N₂ again and was heated to 80° C. overnight. After cooling to rt, the mixture was added with 10 mL of NH₄Cl(aq), and extracted with EtOAc (20 mL×2). The combined organic phase was washed with brine (20 mL), dried over Na₂SO₄ (anhydrous), filtered and concentrated under reduced pressure. The residue was purified by flash chromatography (EA/Hexane=0:100-1:5) to give the title compound (500 mg, 86%). ¹H NMR (400 MHz, CDCl₃) δ ppm 1.27 (s, 9H), 1.34 (s, 12H), 1.57-1.72 (m, 2H), 1.82 (br d, J=13.05 Hz, 2H), 2.66 (br s, 1H), 2.80 (br t, J=12.05 Hz, 2H), 4.25 (br d, J=12.80 Hz, 2H), 7.11-7.42 (m, 2H), 7.77 (d, J=8.03 Hz, 2H). LC-MS: [M+H−100]⁺=288.2.

### Preparation of Intermediate 1-((4-iodophenyl)sulfonyl)-N,N-dimethylpiperidin-4-amine (2b)

[chemical structure]

[1348] To a solution of 4-iodobenzene-1-sulfonyl chloride (2 g, 6.61 mol) and N,N-dimethylpiperidin-4-amine (0.848 g, 6.61 mmol) in DCM (20 ml) was added TEA (1.115 ml, 7.93 mmol). The mixture was stirred at rt for 3 h. LC-MS indicated the reaction was complete. The mixture was concentrated. The residue was purified by flash chromatography (MeOH: DCM=0:100 to 10:100) to give the title compound (2.85 g, 98%) as a white solid. ¹H-NMR (400 MHz, MeOD-d4) δ ppm 1.38-1.61 (m, 2H), 1.86 (br d, J=11.80 Hz, 2H), 2.19-2.56 (m, 6H), 3.01 (br d, J=6.53 Hz, 3H), 3.61 (br d, J=11.80 Hz, 2H), 7.49 (d, J=8.53 Hz, 2H), 8.02 (s, 2H). LC-MS: [M+H]⁺=394.9.

### Preparation of Intermediate 1-((4-(4-bromo-1H-indazol-1-yl)phenyl)sulfonyl)-N,N-dimethylpiperidin-4-amine (2c)

[chemical structure]

[1350] A mixture of 1-((4-iodophenyl)sulfonyl)-N,N-dimethylpiperidin-4-amine (2b) (550 mg, 1.255 mmol), 4-bromo-1H-indazole (297 mg, 1.507 mmol) and K₂CO₃ (521 mg, 3.77 mmol) in DMSO (10 ml) was degassed with N₂ and L-Proline (116 mg, 1.004 mmol) and CuI (96 mg, 0.502 mmol) was added. The resulting mixture was degassed with N₂ again and was heated to 105° C. for 18 h. After cooling to rt, the mixture was added with 10 mL of NH₄Cl(aq), and extracted with EtOAc (20 mL×2). The combined organic phase was washed with brine (20 mL), dried over Na₂SO₄ (anhydrous), filtered and concentrated under reduced pressure. The residue was purified via prep-HPLC to give the title compound (170 mg, 29.2%) as a white solid. LC-MS: [M+H]⁺=463.0; [M+H+2]⁺=465.0.

### Preparation of Intermediate tert-butyl 4-(4-(1-(4-((4-(dimethylamino)piperidin-1-yl)sulfonyl)phenyl)-1H-indazol-4-yl)phenyl)piperidine-1-carboxylate (2d)

[chemical structure]

[1352] To a mixture of tert-butyl 4-(4-(4,4,5,5-tetramethyl-1,3,2-dioxaborolan-2-yl)phenyl)piperidine-1-carboxylate (2a) (251 mg, 0.647 mmol), 1-((4-(4-bromo-1H-indazol-1-yl)phenyl)sulfonyl)-N,N-dimethylpiperidin-4-amine (2c) (200 mg, 0.432 mmol) and K₂CO₃ (179 mg, 1.295 mmol) in a mixture of dioxane (8 mL) and H₂O (1.6 mL) was added PdCl₂(dppf).CH₂Cl₂ adduct (35.2 mg, 0.043 mmol) with N₂ atmosphere. The reaction mixture was heated at 100° C. under microwave for 30 min. After cooling to rt, the mixture was added with 10 mL of NH₄Cl(aq), and extracted with EtOAc (20 mL×2). The combined organic phase was washed with brine (20 mL), dried over Na₂SO₄ (anhydrous), filtered and concentrated under reduced pressure. The residue was purified via prep-HPLC to give the title compound (120 mg, 43.2%) as a white solid. LC-MS: [M+H]⁺=644.3.

### Preparation of N,N-dimethyl-1-((4-(4-(4-(piperidin-4-yl)phenyl)-1H-indazol-1-yl)phenyl)sulfonyl)piperidin-4-amine (2)

[chemical structure]

[1354] To a solution of tert-butyl 4-(4-(1-(4-((4-(dimethylamino)piperidin-1-yl)sulfonyl)phenyl)-1H-indazol-4-yl)phenyl)piperidine-1-carboxylate (2d) (490 mg, 0.761 mmol) in DCM (20 mL) was added 1 M of HCl in EtOAc (10 mL). The mixture was stirred at 40° C. for 3 h. The mixture was concentrated and dried on vacuum to give the title compound (486 mg, 96%). ¹H NMR (400 MHz, DMSO) δ ppm 1.67-1.78 (m, 2H), 1.87-2.15 (m, 6H), 2.37 (t, J=11.42 Hz, 2H), 2.66 (d, J=4.52 Hz, 6H), 2.89-3.11 (m, 3H), 3.19 (br s., 1H), 3.40 (d, J=12.55 Hz, 2H), 3.85 (d, J=11.54 Hz, 2H), 7.44 (d, J=7.78 Hz, 2H), 7.66 (t, J=7.91 Hz, 1H), 7.75 (d, J=8.03 Hz, 2H), 7.92-8.04 (m, 3H), 8.13 (d, J=8.53 Hz, 2H), 8.56 (s, 1H) 8.73-8.89 (m, 1H) 10.52 (br s, 1H). LC-MS: [M+H]⁺=544.2.

### Example 4—Investigations of LSD1 Inhibitors

### Generation of CAR19 Lentiviral Constructs

[1355] The scFvs used in the CAR19 constructs that were assessed in the Examples were independently synthesized based on an anti-CD19 scFV sequence (as described in WO2012/079000). The scFV was cloned in a light-to-heavy chain direction, with a flexible linker connecting the VL and VH domains, into a vector backbone containing the CD8 hinge region along with the 4-1BB molecule and the CD3zeta molecule.

### Cell Lines and Cell Transduction

[1356] Human T cells were transduced by spinoculation with lentiviral supernatant from 293T cells transfected with CAR19 plasmid DNA.

### Cancer Cells

[1357] NALM6 and K562 cell lines were obtained from the ATCC and maintained in media according to supplier's recommendations. To produce a bioluminescent model for T cell killing assays, all cells were transduced with a luciferase lentiviral construct and kept under antibiotic selection.

### Flow Cytometry

[1358] Cells were isolated from in vitro culture, washed once in MACS+0.5% BSA buffer, and stained on ice using either biotinylated Protein L followed by incubated with a fluorochrome-conjugated streptavidin reagent or an antibody recognizing the given target antigen. In all analyses, the population of interest was gated based on forward vs side scatter characteristics, followed by singlet gating, and live cells were gated. Flow cytometry was performed on a four laser Fortessa (Becton-Dickinson).

### Compound Treatments

[1359] In all instances, compounds were either resuspended in either water (H₂O) or DMSO, depending on compound solubility. In all instances compounds were added throughout the T cell culture, and T cells were washed extensively prior to assay. Compounds and concentrations used were 5 ng/mL IL-7 and 5 ng/mL IL-15 (recombinant protein; Peprotech), 5 μM TWS119 (also referred to as GSK3bi or GSK3β-i) (GSK3-beta inhibitor; CAS Number 601514-19-6; Cayman), 1 μM Akt I/11i (also referred to as AKTi or AktI/II inh) (Akt Inhibitor VIII, Isozyme-Selective, Akti-1/2; EMD Millipore), 100 nM LSD1i-GSK (GSK-LSD1 inhibitor, CAS Number 1431368-48-7, Sigma), 200 nM LSD1i-EMD (LSD1 Inhibitor IV, RN-1, HCl; EMD Millipore) 100 nM Compound A (LSD1 inhibitor; Novartis), 100 nM Compound B (LSD1 inhibitor; Novartis), or 100 nM Compound C (LSD1 inhibitor; Novartis) were used. In the figures, “control” refers to vehicle with no additional compound added. IL7/1L15, TWS119, and Akt I/III are published compounds known in the art to expand T_{SCM} T cells (IL7/1L15: Xu et al, Blood. 2014; 123(24):3750-9; AKTi: Crompton et al., Cancer Res. 2015; 75(2):296-305, and van der Waart et al, Blood, 2014; 124(23):3490-500; TWS119: Gattoni et al., Nature Medicine, 2011; 17(10):1290-129).

### Killing Assay

[1360] T cell killing was directed towards CAR19-expressing NALM6 cell lines stably expressing luciferase. Untransduced cells (UTD) and a non-targeting isotype control scFV CART (IsoCAR) were used to determine non-specific background killing levels. The cytolytic activities of CAR19 were measured as a titration of effector:target cell ratios of 10:1 and 2-fold downward dilutions of T cells where effectors were defined as total T cells, and percentages of CAR bearing T cells were normalized by addition of UTD T cells. Assays were initiated by mixing an appropriate number of T cells with a constant number of targets cells. After 20 hours luciferase signal was measured using the Bright-Glo™ Luciferase Assay on the EnVision instrument. Loss of luciferase activity indicates specific killing.

### Cytokine Secretion

[1361] T cell killing was directed towards CAR19-expressing NALM6 cell lines stably expressing luciferase. Untransduced cells (UTD) and a non-targeting isotype control scFV CART (IsoCAR) were used to determine non-specific background cytokine levels. Effector and target cells were incubated at a 3:1 ratio in RPMI containing 10% FBS for 18 hours. Supernatant was analysed by 3-plex array according the manufacturer's instructions (Invitrogen).

### Proliferation Assay

[1362] CAR19 T cells were tested for their ability to proliferate in response to exposure to antigen on target cells. Target cells included NALM6, Raji, and K5624 cells. Untransduced T cells (UTD) and a non-targeting isotype control scFV CART (IsoCAR) were used as non-specific controls for background T cell effects. On the day of assay (Day 0), target cells were counted and transferred to a 50 ml tube in 6 mL of T cell media at 3e6 cells/ml. Target cells were irradiated on ice at 10,000 rad. After irradiation, target cells were washed twice in T cell media, counted, and resuspended to 5e5 cells/ml in T cell media on ice.

[1363] Frozen transduced T cells were thawed, washed in 10 mL complete T cell media, spun at 300 g for 10 min, and resuspended gently in 3 mL of complete T cell media at RT. T-cells were then counted in a cellometer and resuspended to 2.5e6/mL in 10 mL of media. In a 96 well U-bottom plate, 25,000 irradiated target cells and 25,000 transduced CART cells (1:1 ratio) were combined in duplicate wells. In a separate well, 75,000 Anti-CD3/CD28 beads were added in 100 μl of medium to 25,000 transduced T cells to create a 1:3 cells-to-beads ratio as positive control; in another well, 100 μl of medium was added to 25,000 transduced T cells alone as media-only control. Cells were incubated for 4 days at 37° C., 5% CO2.

[1364] On day 4, cells were harvested and duplicates were combined by pipetting and transferring into the same well on the U-bottom plate for staining for FACS of CD3 and CAR using protein L. After staining, cells were resuspended in 120μ1MACS+0.5% BSA buffer and 20 μl/well countbright beads were added to each well. Proliferation was measured as the number of FACS positive cells detected in the period of time used to count 2500 beads.

### Results

[1365] Inhibition of LSD1 by shRNA Promotes the Expansion of T_{SCM} Cells

[1366] T cells were isolated by negative selection and expanded with anti-CD3/CD28 beads at a 3:1 ratio for 10 days. On day 1, T cells were transduced with lentiviral expression vectors containing LSD1 shRNA targeting sequences that co-expressed the fluorescent protein mCherry. Following expansion, T cell phenotypes of mCherry+ T cells were assessed by flow cytometry. LSD1 inhibition significantly enhanced the percentage of naive (Tn) and stem-like memory cells (T_{SCM}) cells in CD8+(FIG. 1) and CD4+ (FIG. 2) T cells relative to controls with scrambled shRNA sequence.

[1367] The results are shown for CD8+ T cells in FIG. 1. When CD8+ T cells were expanded normally, approximately 10% of the resulting T cells are positive for a T_{SCM} phenotype (CD45RA+CD62L+CCR7+CD27+CD95+). In contrast, when CD8+ T cells transfected with DNA encoding shRNA molecules to LSD1 1A, 1B or 2, the resulting T cell population was enriched in T_{SCM} (e.g., CD45RA+CD62L+CCR7+CD27+CD95+), with nearly 50% of the cells having the T_{SCM} (e.g., CD45RA+CD62L+CCR7+CD27+CD95+) phenotype.

[1368] The results are shown for CD4+ T cells in FIG. 2. When CD4+ T cells were expanded normally, less than 2% of the resulting T cells are positive for a T_{SCM} phenotype (CD45RA+CD62L+CCR7+CD27+CD95+). In contrast, when CD4+ T cells transfected with DNA encoding shRNA molecules to LSD1 1A, 1B or 2, the resulting T cell population was enriched in T_{SCM} (e.g., CD45RA+CD62L+CCR7+CD27+CD95+), with, in the case of shRNA 1B, up to 20% of the T cells having the T_{SCM} (e.g., CD45RA+CD62L+CCR7+CD27+CD95+) phenotype.

TABLE 4

| | SEQ | |
|---|---|---|
| Name | ID NO: | Sequence Encoding shRNA |
| Scramble 1 | 123 | GCCGGCAGCTAGCGACGCCATCTCGAGATGGCGTCGCTAGCTGCCGGCTTTTTTGA |
| Scramble 2 | 124 | CCTAAGGTTAAGTCGCCCTCGCTCGAGCGAGGGCGACTTAACCTTAGGTTTTTTGA |
| LSD1 1A | 125 | CGGTTGCTAGAAGCTACATCTGTTAATATTCATAGCAGATGTAGCTTCTAGCAACCGTTTTTTGA |
| LSD1 1B | 126 | CGGTTGCTAGAAGTTACATTTGTTAATATTCATAGCAGATGTAGCTTCTAGCAACCGTTTTTTGA |
| LSD1 2 | 127 | CAGAAGGCCTAGACATTAAACCTCGAGGTTTAATGTCTAGGCCTTCTGTTTTTTGA |
| LSD1 3A | 128 | GCCACATTTCGCAAAGGAAACGTTAATATTCATAGCGTTTCCTTTGCGAAATGTGGCTTTTTTGA |
| LSD1 3B | 129 | GCCACATTTCGTAAAGGAAATGTTAATATTCATAGCGTTTCCTTTGCGAAATGTGGCTTTTTTGA |
| LSD1 4 | 130 | CGGACAAGCTGTTCCTAAAGACTCGAGTCTTTAGGAACAGCTTTGTCCGTTTTTTGA |
| LSD1 6A | 131 | CGAGTTGCCACATTTCGCAAAGTTAATATTCATAGCTTTGCGAAATGTGGCAACTCGTTTTTTGA |

### Inhibition of LSD1 by Small Molecules Promotes the Expansion of T_{SCM} Cells

[1369] The ability of the indicated compounds to produce T cells of a given phenotype was assessed. Naive human T cells were isolated by negative selection and expanded with anti-CD3/CD28 beads at a 3:1 ratio for 10 days in the presence of the indicated compounds. Compounds were refreshed every 2 days. Following expansion, T cell phenotypes were determined by FACS staining. LSD1 inhibition significantly enhanced the percentage of T_{SCM} cells and limits the percentage of T_{EM} cells in CD4+(FIG. 3A) and CD8+ (FIG. 3B) T cells relative to controls and relative to other molecules believed in the art to affect T_{SCM} proliferation.

Inhibition of LSD1 by Small Molecules Promotes a Superior Ratio of T_{SCM} to T_{EM} T Cells

[1370] The ability of the indicated compounds to produce T cells of a given phenotype was assessed. Naive human T cells were isolated by negative selection and expanded with anti-CD3/CD28 beads at a 3:1 ratio for 10 days in the presence of the indicated compounds. Compounds were refreshed every 2 days. Following expansion, T cell phenotypes were determined by FACS staining. LSD1 inhibition promotes a ratio of T_{SCM} to T_{EM} consistent with superior T functionality in CD4+(FIG. 4A) and CD8+(FIG. 4B) T cells relative to controls and relative to other molecules believed in the art to affect T_{SCM} proliferation.

### Expansion of T Cells in the Presence of LSD1 Inhibition

[1371] The ability of T cells to expand in the presence of the indicated compounds was assessed. Naive human T cells were isolated by negative selection and expanded with anti-CD3/CD28 beads at a 3:1 ratio for 10 days in the presence of the indicated compounds. Compounds were refreshed every 2 days. Following expansion, T cell numbers were counted and the fold expansion relative to day 1 was assessed. LSD1 inhibition does not significantly impair T cell expansion relative to controls and relative to other molecules believed in the art to affect T_{SCM} proliferation (FIG. 5).

### Expression of Checkpoint Receptors in T Cells

[1372] Without being bound by theory, it is believed that co-expression of multiple checkpoint receptors is associated with T cell dysfunction. The ability of the indicated compounds to reduce the expression of checkpoint receptor on T cells was assessed. Naive human T cells were isolated by negative selection and expanded with anti-CD3/CD28 beads at a 3:1 ratio for 10 days in the presence of the indicated compounds. Compounds were refreshed every 2 days. Following expansion, T cell phenotypes were determined by FACS staining. LSD1 inhibition reduces the coexpression of PD1, Tim3, and LAG3 on T cells relative to controls (FIG. 6).

### No Effect of LSD1 Inhibition on CART19 Cell Expression

[1373] Total human T cells were isolated by negative selection and expanded with anti-CD3/CD28 beads at a 3:1 ratio for 10 days in the presence of the indicated compounds. Compounds were refreshed every 2 days. Following expansion, CAR19 expression was determined by FACS staining with Protein L. LSD1 inhibition has no effect on CAR19 expression (FIG. 7).

### No Effect of LSD1 Inhibition on CD8+ and CD4+ T Cell Proportions

[1374] Total human T cells were isolated by negative selection and expanded with anti-CD3/CD28 beads at a 3:1 ratio for 10 days in the presence of the indicated compounds. Compounds were refreshed every 2 days. Following expansion, the percentage of CD4+ and CD8+ T cells were assessed determined by flow cytometry. LSD1 inhibition has no effect on the percentages of CD4+ and CD8+ T cells in either untransduced controls (UTD) or CAR19 transduced T cells (FIG. 8).

### No Effect of LSD1 Inhibition on the Expansion of CART19 Cells

[1375] Total human T cells were isolated by negative selection and expanded with anti-CD3/CD28 beads at a 3:1 ratio for 10 days in the presence of the indicated compounds. Compounds were refreshed every 2 days. Following expansion, T cell numbers were counted and the fold expansion relative to day 1 was assessed. CAR19 T cells are able to expand ex vivo in the presence of LSD1 inhibitors, indicating that LSD1 inhibition does not significantly impair T cell expansion in either untransduced controls (UTD) or CAR19 transduced T cells (FIG. 9).

LSD1 Inhibition Enhances Cytokine Production from CART19

[1376] T cells were isolated by negative selection and expanded with anti-CD3/CD28 beads at a 3:1 ratio for 10 days in the presence of the indicated compounds or without treatment (control). T cells were transduced with an anti-CD19 scFV on day 1. Compounds were refreshed every 2 days until day 10 was washed out prior to functional assays, then T cells were frozen. T cells were thawed and incubated with NALM6 cells for 20 hrs. Supernatants were harvested and analyzed by cytokine bead array. LSD1 inhibition significantly enhances cytokine production from CAR19 T cells (FIG. 10).

### LSD1 Inhibition Enhances Proliferation of CART19 Cells

[1377] T cells were isolated by negative selection and expanded with anti-CD3/CD28 beads at a 3:1 ratio for 10 days in the presence of the indicated compounds or without treatment (control). T cells were transduced with an anti-CD19 scFV on day 1. Compounds were refreshed every 2 days until day 10 was washed out prior to functional assays, then T cells were frozen. T cells were then thawed and mixed with CD19+ tumor cells lines NALM6 and Raji, as well as CD19− tumor cell line K562. Tumor cells were irradiated and T cells and tumor cells were mixed at a 1:1 ratio. On day 4 following incubation, T cells were stained for CAR using Protein L and CAR+ T cell numbers were determined by FACS using countbright beads. Proliferation was measured as the number of FACS positive cells detected in the period of time used to count 2500 beads. Data expressed as fold no target control (K562). LSD1 inhibition enhances the proliferative capacity of CAR19 T cells against CD19+ tumor targets (FIG. 11).

### Effect of LSD1 Inhibition on Killing Capacity of CART19 Cells

[1378] T cells were isolated by negative selection and expanded with anti-CD3/CD28 beads at a 3:1 ratio for 10 days in the presence of the indicated compounds or without treatment (control). T cells were transduced with an anti-CD19 scFV on day 1. Compounds were refreshed every 2 days until day 10 was washed out prior to functional assays, then T cells were frozen. T cells were thawed and incubated with the indicated luciferized cell line targets for 20 hrs. Percent killing was determined by analysis of remaining luciferase activity. These data demonstrate that LSD1 inhibition can increase killing capacity of CAR19 T cells at low E:T ratios, but does not have a significant impact on killing capacity at higher E:T ratios (FIG. 12)

Inhibition of LSD1 Promotes Enhances CART19 Cells Efficacy In Vivo T cells were isolated by negative selection and expanded with anti-CD3/CD28 beads at a 3:1 ratio for 10 days in the presence of the indicated compounds or without treatment (control). T cells were transduced with an anti-CD19 scFV on day 1. Compounds were refreshed every 2 days until day 10 was washed out prior to functional assays, then T cells were frozen. T cells were thawed and injected once into mice bearing established luciferized NALM6 tumors. Doses indicated represent the number of total CAR+ cells injected. These data demonstrate that inhibition of LSD1 during the course of expansion in vitro can significantly enhance the anti-tumor effector function of CAR19 T cells in vivo (FIG. 13).

### Multiple LSD1 Inhibitors Promote the Expansion of T_{SCM} Cells

[1379] T cells were isolated by negative selection and expanded with anti-CD3/CD28 beads at a 3:1 ratio for 10 days in the presence of the indicated compounds or without treatment (control). Compounds were refreshed every 2 days. Following expansion, T cell phenotypes were determined by flow cytometry. LSD1 inhibition with multiple inhibitors can significantly enhance the percentage of T_{SCM} cells in CD4+(FIG. 14A) and CD8+(FIG. 14B) T cells relative to controls.

### Expression of Checkpoint Receptors in T Cells

[1380] T cells were isolated by negative selection and expanded with anti-CD3/CD28 beads at a 3:1 ratio for 10 days in the presence of the indicated compounds or without treatment (control). Compounds were refreshed every 2 days. Following expansion, T cell checkpoint receptor expression was determined by flow cytometry. Multiple LSD1 inhibitors can reduce the coexpression of PD1, Tim3, and LAG3 on CD4+(FIG. 15A) and CD8+(FIG. 15B) T cells relative to controls.

### Example 5

### Compound 93 (“Example 93”); Also Referred to Herein as “NVS Compound 1”

### Trans-3-(3-amino-2-methylphenyl)-1-(4-hydroxycyclohexyl)-6-methyl-1H-indole-5-carbonitrile Intermediate 93.1: 3-bromo-6-methyl-1-(1,4-dioxaspiro[4.5]decan-8-yl)-1H-indole-5-carbonitrile

[chemical structure]

[1382] The mixture of compound 74.1 (960 mg, 3.07 mmol), compound 4 (415 mg, 1.77 mmol) and Cs₂CO₃ (1.73 g, 5.31 mmol) in DMF (10 mL) was heated to 100° C. overnight. Then it was diluted with water and extracted with EA for three times. The combined organic phase was washed with brine and dried over Na₂SO₄, filtered and concentrated to give a crude product which was purified by flash column chromatography on silica gel (eluent: PE/EA, EA %=10^{˜}20%) to give the title compound (726 mg) with 80% purity as a white solid. ¹H NMR (300 MHz, CDCl₃) δ ppm 7.84 (s, 1H), 7.29 (s, 1H), 7.26 (s, 1H), 4.35-4.20 (m, 1H), 4.00 (s, 4H), 2.66 (s, 3H), 2.06 (dd, 4H), 1.93 (d, 2H), 1.84-1.76 (m, 2H). LC-MS: [M+H]⁺=375.29, 377.24.

### Intermediate 93.2: 3-bromo-6-methyl-1-(4-oxocyclohexyl)-1H-indole-5-carbonitrile

[chemical structure]

[1384] The mixture of compound 93.1 (480 mg, 1.28 mmol) in the co-solvent of AcOH (7.5 mL) and H₂O (1.5 mL) was heated to 60° C. for 3.5 h. After cooling to rt, 10 mL of water was added. Much solid precipitated, which was filtered and washed with water to give the title compound (357 mg, 84%) as a white solid. ¹H NMR (300 MHz, CDCl₃) δ ppm 7.87 (s, 1H), 7.30 (s, 1H), 7.24 (s, 1H), 4.73 (m, 1H), 2.67 (s, 3H), 2.65-2.60 (m, 4H), 2.46-2.39 (m, 2H), 2.20 (dd, 2H). LC-MS: [M+H]⁺=331.2.

### Intermediate 93.3: 3-bromo-1-(4-hydroxycyclohexyl)-6-methyl-1H-indole-5-carbonitrile

[chemical structure]

[1386] At rt, to a mixture of compound 93.2 (340 mg, 1.03 mmol) in methanol (10 mL) was added NaBH₄ (156 mg, 4.1 mmol) in several portions. The mixture gradually turned clear and was stirred at rt for 1 h. The solvent was removed under vacuum and the residue was dissolved in EA and washed with brine twice. The organic layer was dried over Na₂SO₄, filtered and concentrated to give the title compound (345 mg) as a white solid. ¹H NMR (300 MHz, CDCl₃) δ ppm 7.85 (s, 1H), 7.23 (s, 2H), 4.22 (m, 1H), 3.78 (m, 1H), 2.66 (s, 3H), 2.16 (t, 4H), 1.80 (d, 2H), 1.64 (s, 2H). LC-MS: [M+H]⁺=333.2, 335.3.

[chemical structure]

[1387] To a mixture of compound 93.3 (200 mg, 0.6 mmol) and 2-methyl-3-(4,4,5,5-tetramethyl-1,3,2-dioxaborolan-2-yl)aniline (168 mg, 0.72 mmol) in the co-solvent of i-PrOH/H₂O (6 mL, 10:1) was added 2N Na₂CO₃ aq. (1.8 mL, 3.6 mmol) and Pd(PPh₃)₂Cl₂ (42 mg, 0.06 mmol). The mixture was stirred at 100° C. for 30 min under N₂ atmosphere by microwave reactor. The reaction mixture was diluted with water and extracted with EA for three times. The combined organic phase was washed with brine and dried over Na₂SO₄, concentrated and purified by column chromatography on silica gel (PE: EA=10:1^{˜}2:1) to give a crude product which contained Ph₃P═O. It was purified by prep-HPLC (0.1% TFA/ACN/H₂O) and lyophilized to give the title compound (73.2 mg, 34%) as a pink solid. ¹H NMR (400 MHz, DMSO-d₆) δ ppm 7.76 (s, 1H), 7.69 (d, 1H), 7.64 (s, 1H), 7.21 (t, 1H), 7.07 (d, 2H), 4.47 (d, 2H), 3.84 (s, 1H), 3.58 (t, 2H), 2.59 (s, 3H), 2.13 (d, 3H), 1.94 (t, 6H), 1.53-1.44 (m, 2H). LC-MS: [M+H]⁺=360.3.

### Example 6

[1388] To test the effect of LSD1 inhibition on checkpoint protein expression on T cells, human T cells were isolated by negative selection and expanded with anti-CD3/CD28 beads at a 3:1 ratio for 7 days in the presence of the indicated compounds. Compounds were refreshed every 2 days. Following 7 days of expansion, cells were stained with antibodies against CD4, CD8, PD1, Lag3, and Tim3 and analyzed by flow cytometry. Analysis included assessment of expression of each protein individually (FIG. 16, left panel) or the simultaneous expression of PD1 and Lag3 (PD1+Lag3+) or PD1, Lag3, and Tim3 (PD1+Lag3+Tim3+) (FIG. 16, right panel). Without being bound by theory, expression of checkpoint markers, and especially, co-expression of multiple checkpoint markers, is thought to be indicative of a more exhausted and less poly-functional T cell. The data indicate that the LSD1 inhibitors can reduce the expression of Tim3 alone, or the co-expression of PD1 and Lag3, or the co-expression of PD1, Tim3, and LAG3 on T cells relative to controls. (FIG. 16, left and right panels).

[1389] Next, checkpoint marker expression, as well as the fraction of Tscm T cells in either the CD4+ or CD8+ T cell population was assessed in response to culture of T cells in the presence or absence of LSD1 inhibitor. Briefly, T cells were isolated by negative selection and expanded with anti-CD3/CD28 beads at a 3:1 ratio for 10 days in the presence of the indicated compounds at the indicated doses or without treatment (control). Compounds were added the day after bead addition and refreshed every 2 days. Following expansion, the percentage of T_{SCM} cells was determined in CD4+ and CD8+ T cell subsets by flow cytometry using antibodies against CD4, CD8, CD45RA, CD62L, CCR7, CD27, and CD95. These data show that LSD1 inhibition (with any one of a variety of LSD1 inhibitors from multiple molecular classes) can significantly enhance the percentage of T_{SCM} cells in CD4+(FIG. 17, left panel) and CD8+(Figure FIG. 17, right panel) T cells relative to controls. As well, following expansion, T cell checkpoint receptor expression was determined in CD4+ and CD8+ T cell subsets by flow cytometry using antibodies against CD4, CD8, Tim3, Lag3, and PD1. These data show that LSD1 inhibition (with any one of a variety of LSD1 inhibitors from multiple molecular classes) can significantly reduce the co-expression of PD1, Tim3, and Lag3 on CD4+ T cells (FIG. 18, left panel) and on CD8+(FIG. 18, right panel) T cells relative to controls.

[1390] The foregoing written specification is considered to be sufficient to enable one skilled in the art to practice the invention. The present invention is not to be limited in scope by the constructs deposited, since the deposited embodiments are intended to illustrate only certain aspects of the invention and any constructs that are functionally equivalent are within the scope of this invention. The deposit of material herein does not constitute an admission that the written description herein contained is inadequate to enable the practice of any aspect of the invention, including the best mode thereof, nor is it to be construed as limiting the scope of the claims. Indeed, various modifications of the invention in addition to those shown and described herein will become apparent to those skilled in the art from the foregoing description and fall within the scope of the appended claims.

[1391] It is understood that the application of the teachings of the present invention to a specific problem or situation will be within the capabilities of one having ordinary skill in the art in light of the teachings contained herein.

[1392] The disclosures of each and every citation in the specification are expressly incorporated herein by reference.

### Example 7—Investigations of LSD1 Inhibitors

### Generation of BCMA-CAR Lentiviral Constructs

[1393] The scFvs used in the BCMA constructs that were assessed in the Examples were independently synthesized based on an anti-BCMA scFV sequence of BCMA-10 (139109) (as described in WO2016/014565)). The scFV was cloned in a light-to-heavy chain direction, with a flexible linker connecting the VL and VH domains, into a vector backbone containing the CD8 hinge region along with the 4-1BB molecule and the CD3zeta molecule.

### Cell Lines and Cell Transduction

[1394] Human T cells were transduced by spinoculation with lentiviral supernatant from 293T cells transfected with BCAM-CAR plasmid DNA.

### Cancer Cells

[1395] KMS11, NHICI929 and NALM6 cell lines were obtained from the ATCC and maintained in media according to supplier's recommendations. To produce a bioluminescent model for T cell killing, cytokine assays and in vivo efficacy study, all cells were transduced with a luciferase lentiviral construct and kept under antibiotic selection.

### Flow Cytometry

[1396] Cells were isolated from in vitro culture, washed once in MACS+0.5% BSA buffer, and stained on ice using either biotinylated Protein L followed by incubated with a fluorochrome-conjugated streptavidin reagent or an antibody recognizing the given target antigen. In all analyses, the population of interest was gated based on forward vs side scatter characteristics, followed by singlet gating, and live cells were gated. Flow cytometry was performed on a five laser Fortessa (Becton-Dickinson). Data were analysed using R script (Novartis Internal program) and flowjo software. The antibodies used are listed below in Table 5 (for CD19 CAR detection, anti-idiotype CD19 Antibody was included, for BCMA-CAR detection, protein L was included followed by streptavidin-PE staining).

TABLE 5
Antibodies used for staining

Vendor/Cat#
Biolegend/423102
Biolegend/344822
Biologend/344624
BD/560179
Biologend/302824
BD/562296
Biologend/304210
Biologend/304822
Biologend/353216
Jackson Immunoresearch/016-110-084

| | | | | For 10 plates (ul) | | | | |
|---|---|---|---|---|---|---|---|---|
| Differentiation Panel (Panel 2) | | uL/sample | uL/100 samples | FMO1B | FMO2B | FMO3B | FMO4B | FMO5B |
| BV510 | Viability | | | −CD27 | −CD28 | −CD45RA | −CD62L | −CCR7 |
| AF700 | CD3 | 0.5 | 50 | 5 | 5 | 5 | 5 | 5 |
| PerCP | CD4 | 1 | 100 | 10 | 10 | 10 | 10 | 10 |
| APCH7 | CD8 | 0.5 | 50 | 5 | 5 | 5 | 5 | 5 |
| BV421 | CD27 | 0.7 | 70 | | 7 | 7 | 7 | 7 |
| PE-CF594 | CD28 | 0.7 | 70 | 7 | | 7 | 7 | 7 |
| APC | CD45RA | 0.7 | 70 | 7 | 7 | | 7 | 7 |
| PE-Cy7 | CD62L | 0.7 | 70 | 7 | 7 | 7 | | 7 |
| FITC | CCR7 | 1 | 100 | 10 | 10 | 10 | 10 | |
| PE | Streptavidin | 0.2 | 20 | 2 | 2 | 2 | 2 | 2 |
| | Sum | 6 | 600 | 53 | 53 | 53 | 53 | 53 |
| | FACS Buffer | 34 | 3400 | 347 | 347 | 347 | 347 | 347 |
| | Final | 40 | 4000 | 400 | 400 | 400 | 400 | 400 |
| | Volume/well | | | | | | | |

[1397] Data were analyzed using R script (novartis internal program) and verified by flowjo software. The following parameters were investigated:
[1398] 1. Ratio of CD8/CD4 were calculated;
[1399] 2. % Tscm, Tem, Tcm of CD3+ T cells;
[1400] 3. Ratios of Tscm/Tem and Tscm/Tcm of CD3+ T cells were calculated;
[1401] 4. % Tscm, Tem, Tcm of CD8+ or CD4+ T cells were calculated;
[1402] 5. Ratios of Tscm/Tem and Tscm/Tcm of CD8+ or CD4+ T cells were calculated; and/or
[1403] 6. In the case of CAR+-T cells, percentage of Tscm, Tem, Tcm of CD19-CAR+T, and BCMA-10-CAR+ T cells were evaluated.

[1404] The Tscm population were evaluated as double CD45RA+CCR7+ or triple CD45RA+CCR7+CD62L+ in a given total live CD3+ or subset CD4+ or CD8+ T cell population. Tem were presented as double CD45RA-CCR7− and Tcm as CD45RA-CCR7+ in a given total live CD3+ or subset CD4+ or CD8+ T cell population (FIG. 19 and FIG. 25 illustrate the gating strategies).

### Compound Treatments

[1405] In all instances, LSD inhibitor compounds were either resuspended in water (H₂O) and/or DMSO, depending on compound solubility. In all instances compounds were added throughout the ex vivo T cell culture, and T cells were washed extensively prior to assay. Compounds and concentrations used were 1 pM, 10 pM, 100 pM, 1 nM, 10 nM, 100 nM LSD1i-GSK (GSK-LSD1 inhibitor, CAS Number 1431368-48-7, Sigma); 1 pM, 10 pM, 100 pM, 1 nM, 1.1 nM, 3.3 nM, 10 nM, 100 nM NVS Compound 93 (LSD1 inhibitor; Novartis), or 100 nM Compound B (LSD1 inhibitor; Novartis), or 100 nM Compound A were used. In the figures, “control” refers to vehicle with no LSD inhibitor compound added. For Pan CD3+ T cell expansion experiment, compound treatment was started at 4 h or 24 h after activation; for CART cell production, compound treatment was started at 48 h after viral transduction, and all treatments continued through culture period in all conditions.

### Cytokine Secretion

[1406] T cell killing was directed towards CAR19-expressing NALM6 cell lines or BCMA-expressing KMS11 or NHICI929 cell lines stably expressing luciferase. Untransduced cells (UTD) and a non-targeting isotype control scFV CART (IsoCAR) were used to determine non-specific background cytokine levels. Effector and target cells were incubated at a 1.25:1 ratio in RPMI containing 10% FBS for 18 hours. Supernatant was analysed by 3-plex array according the manufacturer's instructions (Invitrogen).

### Proliferation Assay

[1407] CAR19 T or BCMA_CAR T cells were tested for their ability to proliferate in response to exposure to antigen on target cells. Target cells included NALM6, KMS11 and NHICI929 cells. Untransduced T cells (UTD) and a non-targeting isotype control scFV CART (IsoCAR) were used as non-specific controls for background T cell effects. On the day of assay (Day 0), target cells were counted and transferred to a 50 ml tube in 6 mL of T cell media at 3e6 cells/ml. Target cells were irradiated on ice at 10,000 rad. After irradiation, target cells were washed twice in T cell media, counted, and resuspended to 5e5 cells/ml in T cell media on ice.

[1408] Frozen transduced T cells were thawed, washed in 10 mL complete T cell media, spun at 300 g for 10 min, and resuspended gently in 3 mL of complete T cell media at RT. T-cells were then counted in a cellometer and resuspended to 2.5e6/mL in 10 mL of media. In a 96 well U-bottom plate, 25,000 irradiated target cells and 25,000 transduced CART cells (1:1 ratio) were combined in duplicate wells. In a separate well, 75,000 Anti-CD3/CD28 beads were added in 100 μl of medium to 25,000 transduced T cells to create a 1:3 cells-to-beads ratio as positive control; in another well, 100 μl of medium was added to 25,000 transduced T cells alone as media-only control. In some cases, 30,000 cells were tested for both target and CART cells. Cells were incubated for 4 days at 37° C., 5% CO2.

[1409] On day 4, cells were harvested and duplicates were combined by pipetting and transferring into the same well on the U-bottom plate for staining for FACS of CD3 and CAR using protein L. After staining, cells were resuspended in 120 μl MACS+0.5% BSA buffer and 20 μl/well countbright beads were added to each well. Proliferation was measured as the number of FACS positive cells detected in the period of time used to count 2500 beads.

### In Vivo Efficacy Study of the LSD1i-Conditioned BCMA-CART Cells

[1410] BCMA-CART cells expanded ex vivo either in the presence or absence of LSD1 inhibitor were tested for their ability to eliminate tumor in vivo using the immune compromised NSG mouse bearing established luciferized KMS11 tumors (1e6 cells/mouse); tumor burden are measured by bioluminescent intensity signal generated from the enzyme-substrate (luciferase-luciferin) reaction by injecting the luciferin to the mice.

### Results

### LSD1 Inhibitors Expand Tscm, Reduce Tem at a Dose Responsive Fashion.

[1411] To test the dose responses of LSD1 inhibitors on the T cell phenotypes, human Pan CD3+ T cells from two healthy subjects were isolated by negative selection and expanded with anti-CD3/CD28 beads at a 3:1 ratio for 10 days in the presence of Compound 93 or LSD1i-GSK at different concentrations from 100 nM, and subsequent serial 10× dilution to 1 pM starting at 4 hours after activation. Meanwhile, other three LSD1 inhibitors Compound A and Compound B at 100 nM were also tested for their capability to sustain Tscm cells in some cells starting at 24 h after activation. Compounds were refreshed every 2-3 days when fresh media is replenished. Following 10 days of expansion, T cells were harvested and de-beaded and their phenotypes were analyzed by flow cytometry using antibodies against CD3, CD4, CD8, CD45RA, CCR7, CD62L, CD27 and CD28 plus live/dead dye to exclude the dead cell population. Data show that:
[1412] 1. Both compound 93 and LSD1i-GSK can significantly increase the ratio of CD8/CD4 in response to LSD1i dose escalation, meaning CD8 expand more than CD4 with increased dosage of LSD1 inhibitors during ten day expansion without changing the total expansion rate of total cells. (FIG. 20A).
[1413] 2. Both compound 93 and LSD1i-GSK could increase/sustain CD3+ Tscm, decrease Tem, in a dose responsive fashion, observed between 1 nM to 100 nM; 10 nM and 100 nM showed similar level of induction, while Tcm remain the same. The EC50 of compound 93 and LSD1i-GSK for inducing Tscm CD3+ T cells are 2.59 nM and 1.085 nM, respectively (FIG. 23A and FIG. 23B);
[1414] 3. Correspondingly, the ratio of Tscm/Tem of CD3+ T cells increases in response to dose elevation, but that of Tscm/Tcm remains unchanged at all doses. (FIG. 20B).
[1415] 4. Both compound 93 and LSD1i-GSK could increase/sustain CD8+ Tscm and CD4+Tscm, decrease Tem, in a dose responsive fashion, observed between 1 nM to 100 nM; 10 nM and 100 nM showed similar level of induction, while Tcm remains unchanged. The majority of Tscm population are from CD8 T cells, while CD4+Tscm is about 5% at 100 nM (which is also increased compared to controls and showing positive dose response) observed from these results (FIGS. 21 and 22). The EC50 of compound 93 and LSD1i-GSK for inducing Tscm CD8+ T cells are 3.25 nM and 1.08 nM, respectively (FIG. 23D and FIG. 23C);
[1416] 5. Correspondingly, the ratio of Tscm/Tem of CD8+ T cells significantly increases in response to dose elevation but it was hardly seen in the CD4+population; moreover, the ratio of Tscm/Tcm remains largely unchanged relatively to control. (FIG. 21 and FIG. 22).
[1417] 6. Compound A and Compound B at 100 nM are also able to sustain Tscm and reduce Tem of the total CD3+ and subset of CD8+ T cells, and to much less extent, of the CD4+ T cells, comparable to Compound 93 as shown in FIG. 24.

### LSD1 Inhibition Expands Tscm, Reduce Tem in the CART Product in a Dose Dependent Manner.

[1418] To test the dose responses of LSD1 inhibitors on the CART cell phenotypes, human pan CD3+ T cells from one healthy subject were isolated by negative selection and expanded with anti-CD3/CD28 beads at a 3:1 ratio for 10 days in the presence of Compound 93 at concentrations of 100 nM, 10 nM, 3.3 nM and 1.1 nM starting at 48 hours after viral transduction. Different concentrations of the Compound 93 were refreshed every 2-3 days when fresh media is replenished. Following 10 days of expansion, CART product were harvested and de-beaded and their phenotypes were analyzed by flow cytometry using antibodies against CD3, CD4, CD8, CD45RA, CCR7, CD62L, CD27, CD28, anti-CD19 idiotype or protein L following SA-PE staining plus live/dead dye to exclude the dead cell population. Data show in below bullet points:
[1419] LSD1 inhibition by compound 93 at different tested doses not change the total T cell percentage in all final CART products (UTD, CD19CART and BCMA-CART) (FIG. 26A);
[1420] Compound 93 at different tested doses does not remarkably affect CD19-CAR or BCMA-CAR expression (FIG. 26B).
[1421] Compound 93 at different tested doses does not affect CD8+ CAR and CD4+CAR T cell proportions. (FIG. 26C);
[1422] LSD1 inhibition by Compound 93 augments CD8+Tscm, reduces CD8+Tem and increases the ratio of Tscm/Tem in the final CD19-CART and BCMA-CART cell populations (which include CAR- and CAR+ population), in a dose dependent manner, but does not change the Tcm (either double CD45RA+CCR7+ or triple CD45RA+CCR7+CD62L+) percentage at all tested doses (FIG. 27);
[1423] LSD1 inhibition by Compound 93 sustains CD19CAR+CD8 Tscm, reduces CAR+ Tem but only increases BCMA-CAR+CD8+ Tscm in a dose dependent fashion, the CAR+CD8+ Tcm percentage maintains a similar level at all tested doses (FIG. 28).
   LSD1 Inhibition by Compound 93 Enhances Cytokine Production from CD19-CAR and BCMA-CART

[1424] CD19-CART and BCMA-CART cells were incubated with NALM6 (CD19+ but BCMA−), KMS11 and NHICI929 (both CD19− BCMA+) cell lines for 20 hrs at ratio 1.25 to 1. Supernatants were harvested and analyzed by cytokine bead array. LSD1 inhibition by compound 93 at 100 nM significantly enhances cytokine production from CD19 CART and BCMA-CART cells in response to their specific targets. (FIG. 29).

### LSD1 Inhibition by Compound 93 Enhances Proliferation of CD19-CART and BCMA-CART Cells

[1425] Irradiated tumor lines were mixed with T cells at a 1:1 ratio following 4 day incubation, T cells were stained for CAR using Protein L and CAR+ T cell numbers were determined by FACS using countbright beads. Proliferation was measured as the number of FACS positive cells detected in the period of time used to count 2500 beads. LSD1 inhibition by compound 93 at 100 nM enhances the proliferative capacity of CD19-CART and BCMA-CART cells against CD19+ or BCMA+ target cells, respectively, shown in FIG. 30-32 measured as total CAR+CD3, CD8 or CD4 T cells.

### Inhibition of LSD1 Enhances BCMA-CART Cells Efficacy In Vivo

[1426] Untransduced T cells and BCMA-CART cells with or without ex vivo LSD1i treatment were injected once into mice bearing established luciferized KMS11 tumors. A Total 6.25 million T cells including 0.167 millions of total CAR+ cells were injected. Interestingly, we found that inhibition of LSD1 increases the anti-tumor activity of CAR negative T cells. Without being bound by theory, this activity may be the result of the increased fraction of Tscm cells as a result of LSD1 inhibition, which results in a population of cells with increased cytokine production and proliferative potential. As well, inhibition of LSD1 enhances the efficacy BCMA-CART cells in vivo. These data demonstrate that compound 93-treated untransduced T cells alone show anti-tumor activity in a slow regression mode over time. As well, this compound can also significantly enhance the antigen-specific anti-tumor function of BCMA CART cells in the acute phase comparing the regular BCMA-CART, while both CART cells (one with, one without compound 93) have durable effects on eliminating tumor growth (FIG. 33).

[1427] This application is being filed with a sequence listing. To the extent there are any discrepancies between the sequence listing and any sequence recited in the specification, the sequence recited in the specification should be considered the correct sequence.

### INCORPORATION BY REFERENCE

[1428] All publications, patents, and patent applications mentioned herein are hereby incorporated by reference in their entirety as if each individual publication, patent or patent application was specifically and individually indicated to be incorporated by reference. In case of conflict, the present application, including any definitions herein, will control.

### EQUIVALENTS

[1429] Those skilled in the art will recognize, or be able to ascertain using no more than routine experimentation, many equivalents to the specific embodiments of the invention described herein. While this invention has been disclosed with reference to specific aspects, it is apparent that other aspects and variations of this invention may be devised by others skilled in the art without departing from the true spirit and scope of the invention. The appended claims are intended to be construed to include all such aspects and equivalent variations.

1. A method of treating a subject, comprising administering to said subject an LSD1 inhibitor and a population of immune effector cells engineered to express a CAR.

2. The method of claim 1, wherein:
a) the LSD1 inhibitor is administered before the subject is administered said population of immune effector cells;
b) the LSD1 inhibitor is administered concurrently with said population of immune effector cells;
c) the LSD1 inhibitor is administered after the subject is administered said population of immune effector cells; or
d) any combination of a), b) and/or c).

3. The method of claim 2, wherein the LSD1 inhibitor is administered before the subject is administered said population of immune effector cells, and wherein said administration of the LSD1 inhibitor is continued for a period of time after the administration of said population of immune effector cells.

4. The method of claim 3, wherein the administration of the LSD1 inhibitor is in an amount sufficient to increase an anti-tumor effect of said population of immune effector relative to an equivalent population of said immune effector cells administered in the absence of said LSD1 inhibitor.

5. A method of increasing the therapeutic efficacy of a population of immune effector cells engineered to express a CAR, e.g., a CART19 (e.g., CTL019), comprising a step of decreasing the activity or expression of LSD1 in said cells, transiently or permanently.

6. The method of claim 5, wherein the step of decreasing the activity or expression of LSD1 in said cells comprises contacting the cells with an LSD1 inhibitor.

7. The method of any of claim 1-4 or 6, wherein the administration or the contacting of the LSD1 inhibitor results in:
1) an increase in the proportion of naive T cells, e.g., T_{SCM} cells;
2) an increase in the number of naive T cells, e.g., T_{SCM} cells;
3) a decrease in the number of T_{EM} cells;
4) a decrease in the proportion of T_{EM} cells;
5) an increase in the proportion of CD45RA+CD62L+ T cells;
6) an increase in the number of CD45RA+CD62L+ T cells;
7) an increase in the proportion of CD45RA+CCR7+ T cells;
8) an increase in the number of CD45RA+CCR7+ T cells;
9) a decrease in the proportion of PD-1 positive immune effector cells;
10) an increase in the ratio of PD-1 negative immune effector cells/PD-1 positive immune effector cells;
11) a decrease in the proportion of PD-1+/Lag3+/Tim3+ immune effector cells;
12) an increase in the ratio of PD-1−/Lag3−/Tim3− immune effector cells to PD-1+/Lag3+/Tim3+ immune effector cells;
13) an increase in the proliferation of the immune effector cells;
14) an increase in the production of cytokines (e.g., IFNg and/or IL-2) from said population of immune effector cells; or
15) a combination of two or more of the above;
optionally as compared to cells not contacted with the LSD1 inhibitor.

8. A method of treating a subject, comprising:
a) administering an LSD1 inhibitor to a subject;
b) collecting a population of immune effector cells from the subject of step a), after said administration of the LSD1 inhibitor;
c) providing said population of immune effector cells ex vivo;
d) contacting said ex vivo population of immune effector cells with the LSD1 inhibitor, wherein the contacting with the LSD1 inhibitor causes one or more of the following to occur:
1) an increase in the proportion of naive T cells, e.g., T_{SCM} cells;
2) an increase in the number of naive T cells, e.g., T_{SCM} cells;
3) a decrease in the number of T_{EM} cells;
4) a decrease in the proportion of T_{EM} cells;
5) an increase in the proportion of CD45RA+CD62L+ T cells;
6) an increase in the number of CD45RA+CD62L+ T cells;
7) an increase in the proportion of CD45RA+CCR7+ T cells;
8) an increase in the number of CD45RA+CCR7+ T cells;
9) a decrease in the proportion of PD-1 positive immune effector cells;
10) an increase in the ratio of PD-1 negative immune effector cells/PD-1 positive immune effector cells;
11) a decrease in the proportion of PD-1+/Lag3+/Tim3+ immune effector cells;
12) an increase in the ratio of PD-1−/Lag3−/Tim3− immune effector cells to PD-1+/Lag3+/Tim3+ immune effector cells;
13) an increase in the proliferation of the immune effector cells;
14 an increase in the production of cytokines (e.g., IFNg and/or IL-2) from said population of immune effector cells; or
15) a combination of two or more of the above;
as compared to a non-contacted ex vivo population of immune effector cells; and
e) administering the population of immune effector cells to a subject.

9. The method of claim 8, wherein the step of e) further comprises administering the LSD1 inhibitor to the subject of step e).

10. The method of claim 8 or 9, further comprising the step of inserting nucleic acid that encodes a CAR into cells of the ex vivo population of immune effector cells.

11. A method of making a population of immune effector cells comprising:
a) contacting a population of immune effector cells with an LSD1 inhibitor;
thereby making a population of immune effector cells,
wherein the contacting with the LSD1 inhibitor causes one or more of the following to occur:
1) an increase in the proportion of naive T cells, e.g., T_{SCM} cells;
2) an increase in the number of naive T cells, e.g., T_{SCM} cells;
3) a decrease in the number of T_{EM} cells;
4) a decrease in the proportion of T_{EM} cells;
5) an increase in the proportion of CD45RA+CD62L+ T cells;
6) an increase in the number of CD45RA+CD62L+ T cells;
7) an increase in the proportion of CD45RA+CCR7+ T cells;
8) an increase in the number of CD45RA+CCR7+ T cells;
9) a decrease in the proportion of PD-1 positive immune effector cells;
10) an increase in the ratio of PD-1 negative immune effector cells/PD-1 positive immune effector cells;
11) a decrease in the proportion of PD-1+/Lag3+/Tim3+ immune effector cells;
12) an increase in the ratio of PD-1−/Lag3−/Tim3− immune effector cells to PD-1+/Lag3+/Tim3+ immune effector cells;
13) an increase in the proliferation of the immune effector cells;
14 an increase in the production of cytokines (e.g., IFNg and/or IL-2) from said population of immune effector cells; or
15) a combination of two or more of the above;
as compared to a non-contacted population of immune effector cells.

12. The method of claim 11, further comprising the step of b) inserting nucleic acid that encodes the CAR into cells of the population of immune effector cells.

13. The method of claim 12 wherein said contacting of step a) occurs
1) prior to;
2) concurrently with;
3) after; or
4) any combination of two or more of 1) to 3) above;
said inserting of step b).

14. The method of any of claims 11-13, wherein the contacting of step a), and optionally the inserting of step b), is ex vivo.

15. A population of immune effector cells, made by the method of any of claims 11-14.

16. A population of immune effector cells engineered to express a chimeric antigen receptor (CAR), wherein the CAR comprises an antigen-binding domain, a transmembrane domain, and an intracellular signaling domain, and wherein expression and/or function of LSD1 in said cell has been reduced or eliminated.

17. The population of immune effector cells of claim 16, comprising an LSD1 inhibitor.

18. The population of immune effector cells of claim 16, wherein the population of immune effector cells has been contacted with an LSD1 inhibitor.

19. The method or population of immune effector cells of any of the preceding claims, wherein the population of immune effector cells comprise, e.g., consist of, T cells or NK cells.

20. The method or population of immune effector cells of claim 19, wherein the population of immune effector cells comprise, e.g., consist of, T cells.

21. The method or population of immune effector cells of claim 20, wherein the T cells are CD8+ T cells, CD4+ T cells, or a combination thereof.

22. The method or population of immune effector cells of any of the preceding claims, wherein the immune effector cells are human cells.

23. The method of any of claim 1-7, 10, 12-14 or 18-22, or population of immune effector cells of any of claims 15-22, wherein the CAR comprises an antigen binding domain (which is optionally an antibody or antibody fragment, TCR or TCR fragment), a transmembrane domain, and an intracellular signaling domain (which is optionally an intracellular signaling domain comprising a costimulatory domain and/or a primary signaling domain).

24. The method or population of immune effector cells of claim 23, wherein the antigen-binding domain binds to a tumor antigen selected from a group consisting of: TSHR, CD19, CD123, CD22, CD30, CD171, CS-1, CLL-1, CD33, EGFRvIII, GD2, GD3, BCMA, Tn Ag, PSMA, ROR1, FLT3, FAP, TAG72, CD38, CD44v6, CEA, EPCAM, B7H3, KIT, IL-13Ra2, Mesothelin, IL-11Ra, PSCA, PRSS21, VEGFR2, LewisY, CD24, PDGFR-beta, SSEA-4, CD20, Folate receptor alpha, ERBB2 (Her2/neu), MUC1, EGFR, NCAM, Prostase, PAP, ELF2M, Ephrin B2, IGF-I receptor, CAIX, LMP2, gp100, bcr-abl, tyrosinase, EphA2, Fucosyl GM1, sLe, GM3, TGS5, HMWMAA, o-acetyl-GD2, Folate receptor beta, TEM1/CD248, TEM7R, CLDN6, GPRC5D, CXORF61, CD97, CD179a, ALK, Polysialic acid, PLAC1, GloboH, NY-BR-1, UPK2, HAVCR1, ADRB3, PANX3, GPR20, LY6K, OR51E2, TARP, WT1, NY-ESO-1, LAGE-1a, MAGE-A1, legumain, HPV E6, E7, MAGE A1, ETV6-AML, sperm protein 17, XAGE1, Tie 2, MAD-CT-1, MAD-CT-2, Fos-related antigen 1, p53, p53 mutant, prostein, survivin and telomerase, PCTA-1/Galectin 8, MelanA/MART1, Ras mutant, hTERT, sarcoma translocation breakpoints, ML-IAP, ERG (TMPRSS2 ETS fusion gene), NA17, PAX3, Androgen receptor, Cyclin B1, MYCN, RhoC, TRP-2, CYP1B1, BORIS, SART3, PAX5, OY-TES1, LCK, AKAP-4, SSX2, RAGE-1, human telomerase reverse transcriptase, RU1, RU2, intestinal carboxyl esterase, mut hsp70-2, CD79a, CD79b, CD72, LAIR1, FCAR, LILRA2, CD300LF, CLEC12A, BST2, EMR2, LY75, GPC3, FCRL5, and IGLL1.

25. The method or population of immune effector cells of claim 24, wherein the tumor antigen is CD19 or BCMA.

26. The method or population of immune effector cells of claim 25, wherein:
the antigen-binding domain is an antibody or antibody fragment comprising:
(i) the amino acid sequence of a CD19 binding domain according to Tables 6-9, e.g., the amino acid sequence of CTL019 scFv domain according to Table 9 or an amino acid sequence according to SEQ ID NO: 957, or an amino acid sequence at least 95% identical thereto;
(ii) the amino acid sequence of a humanized CD19 binding domain according to Tables 6-9, e.g., the amino acid sequence of CAR2 scFv domain according to Table 9 or an amino acid sequence according to SEQ ID NO: 898, or an amino acid sequence at least 95% identical thereto; or
(iii) the amino acid sequence of a BCMA binding domain according to Tables 11A-11B, e.g., the amino acid sequence of 139109 scFv domain according to Table 11A or an amino acid sequence according to SEQ ID NO: 967, or an amino acid sequence at least 95% identical thereto; or
wherein the CAR comprises:
(i) the amino acid sequence of a CD19 CAR according to Tables 6-9, e.g., the amino acid sequence of CTL019 according to Table 9 or an amino acid sequence according to SEQ ID NO: 956 or an amino acid sequence at least 95% identical thereto;
(ii) the amino acid sequence of a humanized CD19 CAR according to Tables 6-9, e.g., the amino acid sequence of CAR2 according to Table 9 or an amino acid sequence according to SEQ ID NO: 902, or an amino acid sequence at least 95% identical thereto; or
(iii) the amino acid sequence of a BCMA CAR according to Tables 11A-11B, e.g., the amino acid sequence of 139109 CAR according to Table 11A or an amino acid sequence according to SEQ ID NO: 971, or an amino acid sequence at least 95% identical thereto.

27. The method or population of immune effector cells of any of claims 23-26, wherein the transmembrane domain comprises:
(i) an amino acid sequence having at least one, two or three modifications but not more than 20, 10 or 5 modifications of an amino acid sequence of SEQ ID NO: 12, or a sequence with 95-99% identity to an amino acid sequence of SEQ ID NO: 12; or
(ii) the sequence of SEQ ID NO: 12.

28. The method or population of immune effector cells of any of claim 23-27, wherein the antigen binding domain is connected to the transmembrane domain by a hinge region, wherein said hinge region comprises SEQ ID NO: 2 or SEQ ID NO: 6, or a sequence with 95-99% identity thereof.

29. The method or population of immune effector cells of any of claims 23-28, wherein the intracellular signaling domain comprises a primary signaling domain and/or a costimulatory signaling domain, wherein the primary signaling domain comprises a functional signaling domain of a protein chosen from CD3 zeta, CD3 gamma, CD3 delta, CD3 epsilon, common FcR gamma (FCER1G), FcR beta (Fc Epsilon R1b), CD79a, CD79b, Fcgamma RIIa, DAP10, or DAP12.

30. The method or population of immune effector cells of any of claims 23-29, wherein the primary signaling domain comprises:
(i) an amino acid sequence having at least one, two or three modifications but not more than 20, 10 or 5 modifications of an amino acid sequence of SEQ ID NO: 18 or SEQ ID NO: 20, or a sequence with 95-99% identity to an amino acid sequence of SEQ ID NO: 18 or SEQ ID NO: 20; or
(ii) the amino acid sequence of SEQ ID NO:18 or SEQ ID NO: 20.

31. The method or population of immune effector cells of any of claims 23-30, wherein the intracellular signaling domain comprises a costimulatory signaling domain, or a primary signaling domain and a costimulatory signaling domain, wherein the costimulatory signaling domain comprises a functional signaling domain of a protein selected from the group consisting of CD27, CD28, 4-1BB (CD137), OX40, CD30, CD40, PD-1, ICOS, lymphocyte function-associated antigen-1 (LFA-1), CD2, CD7, LIGHT, NKG2C, B7-H3, a ligand that specifically binds with CD83, CDS, ICAM-1, GITR, BAFFR, HVEM (LIGHTR), SLAMF7, NKp80 (KLRF1), CD160, CD19, CD4, CD8alpha, CD8beta, IL2R beta, IL2R gamma, IL7R alpha, ITGA4, VLA1, CD49a, ITGA4, IA4, CD49D, ITGA6, VLA-6, CD49f, ITGAD, CD11d, ITGAE, CD103, ITGAL, CD11a, LFA-1, ITGAM, CD11b, ITGAX, CD11c, ITGB1, CD29, ITGB2, CD18, LFA-1, ITGB7, TNFR2, TRANCE/RANKL, DNAM1 (CD226), SLAMF4 (CD244, 2B4), CD84, CD96 (Tactile), CEACAM1, CRTAM, Ly9 (CD229), CD160 (BY55), PSGL1, CD100 (SEMA4D), CD69, SLAMF6 (NTB-A, Ly108), SLAM (SLAMF1, CD150, IPO-3), BLAME (SLAMF8), SELPLG (CD162), LTBR, LAT, GADS, SLP-76, PAG/Cbp, NKp44, NKp30, NKp46, and NKG2D.

32. The method or population of immune effector cells of any of claims 23-31, wherein the costimulatory signaling domain comprises an amino acid sequence having at least one, two or three modifications but not more than 20, 10 or 5 modifications of an amino acid sequence of SEQ ID NO:14 or SEQ ID NO: 16, or a sequence with 95-99% identity to an amino acid sequence of SEQ ID NO:14 or SEQ ID NO: 16.

33. The method or population of immune effector cells of any of claims 23-32, wherein the costimulatory signaling domain comprises a sequence of SEQ ID NO: 14 or SEQ ID NO: 16.

34. The method or population of immune effector cells of any of claims 23-33, wherein the intracellular domain comprises the sequence of SEQ ID NO: 14 or SEQ ID NO: 16, and the sequence of SEQ ID NO: 18 or SEQ ID NO: 20, wherein the sequences comprising the intracellular signaling domain are expressed in the same frame and as a single polypeptide chain.

35. The method or population of immune effector cells of any of claims 23-34, wherein the CAR comprises a leader sequence comprising, e.g., consisting of, SEQ ID NO: 2.

36. The method or population of immune effector cells of any of the preceding claims, wherein the LSD1 inhibitor is: (1) a gene editing system targeted to one or more sites of the LSD1 gene, or its corresponding regulatory elements; (2) a nucleic acid (e.g., an siRNA or shRNA, or antisense oligonucleotide) comprising sequence complementary to a target sequence of the LSD1 gene; (3) a protein (e.g., a dominant negative LSD1, e.g., catalytically inactive LSD1, or a dominant negative binding partner of LSD1); (4) a small molecule; (5) a nucleic acid encoding any of (1)-(3); or (6) any combination of (1)-(5).

37. The method or population of immune effector cells of claim 36, wherein the LSD1 inhibitor is an shRNA or siRNA comprising sequence complementary to a target sequence of the LSD1 gene listed in Table 1, e.g., selected from SEQ ID NO: [43] to SEQ ID NO: [82].

38. The method or population of immune effector cells of claim 36, wherein the LSD1 inhibitor is an shRNA encoded by nucleic acid comprising any sequence encoding an anti-LSD1 shRNA of Table 1, e.g., encoded by nucleic acid comprising a sequence selected from SEQ ID NO: [83] to SEQ ID NO: [122].

39. The method or population of immune effector cells of claim 36, wherein the LSD1 inhibitor is nucleic acid comprising any sequence encoding an anti-LSD1 shRNA of Table 1, e.g., a sequence selected from SEQ ID NO: [83] to SEQ ID NO: [122].

40. The method or population of immune effector cells of claim 39, wherein said nucleic acid is disposed on a vector.

41. The method or population of immune effector cells of claim 40, wherein the vector further comprises a U6 or H1 promoter operably linked to said nucleic acid.

42. The method or population of immune effector cells of any of claims 40-41, wherein the vector is a retroviral vector, a lentiviral vector, an adenoviral vector, an adeno-associated viral (AAV) vector, a herpes simplex virus (HSV) vector, a plasmid, a minicircle, a nanoplasmid, or an RNA vector.

43. The method or population of immune effector cells of any of claims 40-42, wherein the vector further comprises sequence encoding a CAR.

44. The method or population of immune effector cells of claim 36, wherein the LSD1 inhibitor is a genome editing system specific for a sequence of the LSD1 gene (KDM1A) or its regulatory elements selected from a CRISPR genome editing system, a zinc finger nuclease genome editing system, a TALEN genome editing system and a meganuclease genome editing system.

45. The method or population of immune effector cells of claim 44, wherein the LSD1 inhibitor is a CRISPR genome editing system comprising a gRNA molecule comprising a targeting domain complementary to a sequence of the LSD1 gene (KDM1A) or its regulatory elements, e.g., comprising any one of SEQ ID NO: [132] to [862].

46. The method or population of immune effector cells of claim 36, wherein the LSD1 inhibitor is a small molecule.

47. The method or population of immune effector cells of claim 46, wherein the small molecule is a reversible or irreversible LSD1 inhibitor.

48. The method or population of immune effector cells of claim 46 or 47, wherein the LSD1 inhibitor is:
a) GSK2699537;
b) rel-2-[[(1R,2S)-2-[4-[(4-chlorophenyl)methoxy]phenyl]cyclopropyl]amino]-1-(4-methyl-1-piperazinyl)-ethanone;
c) (R)-4-(5-(pyrrolidin-3-ylmethoxy)-2-(p-tolyl)pyridin-3-yl)benzonitrile;
d) (1S,2R)—N-((2-methoxypyridin-3-yl)methyl)-2-phenylcyclopropan-1-amine;
e) N,N-dimethyl-1-((4-(4-(4-(piperidin-4-yl)phenyl)-1H-indazol-1-yl)phenyl)sulfonyl)piperidin-4-amine;
f) 5-(6-chloro-4′-(methylsulfonyl)-[1,1′-biphenyl]-3-yl)-2-(piperazin-1-yl)-1H-pyrrole-3-carbonitrile;
g) rel-N-[(1R,2S)-2-Phenylcyclopropyl]-4-Piperidinamine;
h) 2-(1R,2S)-2-(4-(Benzyloxy)phenyl)cyclopropylamino)-1-(4-methylpiperazin-1-yl)ethanone;
i) Trans-3-(3-amino-2-methylphenyl)-1-(4-hydroxycyclohexyl)-6-methyl-1H-indole-5-carbonitrile;
or
j) a pharmaceutically acceptable salt of any of the foregoing.

49. The method or population of immune effector cells of any of claims 46-48, wherein the LSD1 inhibitor is conjugated to an antibody or antigen-binding fragment thereof.

50. The method or population of immune effector cells of claim 49, wherein the antibody or antigen-binding fragment thereof recognizes an antigen on the surface of a T cell.

51. The method or population of immune effector cells of claim 50, wherein the antigen on the surface of a T cell is CD3.

52. The method or population of immune effector cells of claim 36, wherein the LSD1 inhibitor is a protein, e.g., is a dominant negative binding partner of LSD1 (e.g., a histone deacetylase (HDAC) that interacts with LSD1 or other member of the Co-REST or AR co-activator complex), or nucleic acid encoding said dominant negative binding partner of LSD1.

53. The method or population of immune effector cells of claim 36, wherein the inhibitor of LSD1 is a protein, e.g., is a dominant negative (e.g., catalytically inactive) LSD1, or nucleic acid encoding said dominant negative LSD1.

54. A method of treating a subject in need thereof, comprising administering to said subject an effective amount of the population of immune effector cells of any of claims 15-18.

55. The method of claim 54, wherein the method further comprises administering to said subject an LSD1 inhibitor.

56. The method of claim 55, wherein the subject receives a pre-treatment of the LSD1 inhibitor, prior to the administration of the population of immune effector cells.

57. The method of any of claims 55-56, wherein the subject receives concurrent treatment with an LSD1 inhibitor and the population of immune effector cells.

58. The method of any of claims 55-57, wherein the subject receives treatment with an LSD1 inhibitor after administration of the population of immune effector cells.

59. The method of any of claim 1-15 or 19-58, wherein the subject has a disease associated with expression of a tumor antigen, e.g., a proliferative disease, a precancerous condition, a cancer, and a non-cancer related indication associated with expression of the tumor antigen.

60. The method of claim 59, wherein the cancer is a hematologic cancer chosen from one or more of chronic lymphocytic leukemia (CLL), acute leukemias, acute lymphoid leukemia (ALL), acute myeloid leukemia (AML), B-cell acute lymphoid leukemia (B-ALL), T-cell acute lymphoid leukemia (T-ALL), chronic myelogenous leukemia (CML), B cell prolymphocytic leukemia, blastic plasmacytoid dendritic cell neoplasm, Burkitt's lymphoma, diffuse large B cell lymphoma, follicular lymphoma, hairy cell leukemia, small cell- or a large cell-follicular lymphoma, malignant lymphoproliferative conditions, MALT lymphoma, mantle cell lymphoma, marginal zone lymphoma, multiple myeloma, myelodysplasia and myelodysplastic syndrome, non-Hodgkin's lymphoma, Hodgkin's lymphoma, plasmablastic lymphoma, plasmacytoid dendritic cell neoplasm, Waldenstrom macroglobulinemia, or pre-leukemia.

61. The use or method of claim 59, wherein the cancer is selected from the group consisting of colon cancer, rectal cancer, renal-cell carcinoma, liver cancer, non-small cell carcinoma of the lung, cancer of the small intestine, cancer of the esophagus, melanoma, bone cancer, pancreatic cancer, skin cancer, cancer of the head or neck, cutaneous or intraocular malignant melanoma, uterine cancer, ovarian cancer, rectal cancer, cancer of the anal region, stomach cancer, testicular cancer, uterine cancer, carcinoma of the fallopian tubes, carcinoma of the endometrium, carcinoma of the cervix, carcinoma of the vagina, carcinoma of the vulva, Hodgkin's Disease, non-Hodgkin's lymphoma, cancer of the endocrine system, cancer of the thyroid gland, cancer of the parathyroid gland, cancer of the adrenal gland, sarcoma of soft tissue, cancer of the urethra, cancer of the penis, solid tumors of childhood, cancer of the bladder, cancer of the kidney or ureter, carcinoma of the renal pelvis, neoplasm of the central nervous system (CNS), primary CNS lymphoma, tumor angiogenesis, spinal axis tumor, brain stem glioma, pituitary adenoma, Kaposi's sarcoma, epidermoid cancer, squamous cell cancer, T-cell lymphoma, environmentally induced cancers, combinations of said cancers, and metastatic lesions of said cancers.

62. The method or population of immune effector cells of any of the preceding claims, wherein the subject is a human.

63. The method or population of immune effector cells of claim 62, wherein the human has a disease associated with expression of a tumor antigen, e.g., a cancer.

64. A compound selected from N,N-dimethyl-1-((4-(4-(4-(piperidin-4-yl)phenyl)-1H-indazol-1-yl)phenyl)sulfonyl)piperidin-4-amine and 5-(6-chloro-4′-(methylsulfonyl)biphenyl-3-yl)-2-(piperazin-1-yl)-1H-pyrrole-3-carbonitrile; or a pharmaceutically acceptable salt thereof.

65. A pharmaceutically acceptable salt of the compound of claim 64.

66. The compound of any of claims 64-65, for use in therapy.

67. The compound of any of claims 64-65, for use in the method of any of claim 1-14, 19-36, 46-51, or 54-63.

68. A composition for use in ex vivo manufacturing a population of immune effector cells, comprising an LSD1 inhibitor.

69. The composition of claim 68, wherein the LSD1 inhibitor is a small molecule.

70. The composition of claim 69, wherein the concentration of the small molecule ranges from about 0.001 nM to about 10 mM, e.g., from about 0.001 nM to about 100 nM.

71. The composition of claim 70, wherein the concentration of the small molecule ranges from about 0.1 uM to about 10 uM.

72. The composition of any of claims 68-71, wherein the population of immune effector cells comprises cells engineered to express a CAR.

73. An LSD1 inhibitor, for use in treating a subject, wherein said subject has received, is receiving, or is about to receive therapy comprising an immune effector cell, e.g., an immune effector cell engineered to express a CAR.

74. An LSD1 inhibitor, for use in the manufacture of an immune effector cell, e.g., an immune effector cell engineered to express a CAR.

75. A method of manufacturing an immune effector cells comprising introducing into said cells nucleic acid encoding a CAR, wherein the nucleic acid integrates into the genome of said cell within the LSD1 gene, such that LSD1 expression and/or function is reduced.

The application's sequence listing, which the Patent Office published only in electronic form, follows.

SEQUENCE LISTING (1941 sequences)

SEQ ID NO: 1 - DNA, 1184 bp, Artificial Sequence
  Description of Artificial Sequence: Synthetic polynucleotide
cgtgaggctccggtgcccgtcagtgggcagagcgcacatcgcccacagtccccgagaagttggggggaggggtcggcaattgaaccggtgcctagagaaggtggcgcggggtaaactgggaaagtgatgtcgtgtactggctccgcctttttcccgagggtgggggagaaccgtatataagtgcagtagtcgccgtgaacgttctttttcgcaacgggtttgccgccagaacacaggtaagtgccgtgtgtggttcccgcgggcctggcctctttacgggttatggcccttgcgtgccttgaattacttccacctggctgcagtacgtgattcttgatcccgagcttcgggttggaagtgggtgggagagttcgaggccttgcgcttaaggagccccttcgcctcgtgcttgagttgaggcctggcctgggcgctggggccgccgcgtgcgaatctggtggcaccttcgcgcctgtctcgctgctttcgataagtctctagccatttaaaatttttgatgacctgctgcgacgctttttttctggcaagatagtcttgtaaatgcgggccaagatctgcacactggtatttcggtttttggggccgcgggcggcgacggggcccgtgcgtcccagcgcacatgttcggcgaggcggggcctgcgagcgcggccaccgagaatcggacgggggtagtctcaagctggccggcctgctctggtgcctggcctcgcgccgccgtgtatcgccccgccctgggcggcaaggctggcccggtcggcaccagttgcgtgagcggaaagatggccgcttcccggccctgctgcagggagctcaaaatggaggacgcggcgctcgggagagcgggcgggtgagtcacccacacaaaggaaaagggcctttccgtcctcagccgtcgcttcatgtgactccacggagtaccgggcgccgtccaggcacctcgattagttctcgagcttttggagtacgtcgtctttaggttggggggaggggttttatgcgatggagtttccccacactgagtgggtggagactgaagttaggccagcttggcacttgatgtaattctccttggaatttgccctttttgagtttggatcttggttcattctcaagcctcagacagtggttcaaagtttttttcttccatttcaggtgtcgtga

SEQ ID NO: 2 - protein, 21 aa, Artificial Sequence
  Description of Artificial Sequence: Synthetic peptide
MALPVTALLLPLALLLHAARP

SEQ ID NO: 3 - DNA, 63 bp, Artificial Sequence
  Description of Artificial Sequence: Synthetic oligonucleotide
atggccctgcctgtgacagccctgctgctgcctctggctctgctgctgcatgccgctagaccc

SEQ ID NO: 4 - protein, 45 aa, Artificial Sequence
  Description of Artificial Sequence: Synthetic polypeptide
TTTPAPRPPTPAPTIASQPLSLRPEACRPAAGGAVHTRGLDFACD

SEQ ID NO: 5 - DNA, 135 bp, Artificial Sequence
  Description of Artificial Sequence: Synthetic polynucleotide
accacgacgccagcgccgcgaccaccaacaccggcgcccaccatcgcgtcgcagcccctgtccctgcgcccagaggcgtgccggccagcggcggggggcgcagtgcacacgagggggctggacttcgcctgtgat

SEQ ID NO: 6 - protein, 230 aa, Artificial Sequence
  Description of Artificial Sequence: Synthetic polypeptide
ESKYGPPCPPCPAPEFLGGPSVFLFPPKPKDTLMISRTPEVTCVVVDVSQEDPEVQFNWYVDGVEVHNAKTKPREEQFNSTYRVVSVLTVLHQDWLNGKEYKCKVSNKGLPSSIEKTISKAKGQPREPQVYTLPPSQEEMTKNQVSLTCLVKGFYPSDIAVEWESNGQPENNYKTTPPVLDSDGSFFLYSRLTVDKSRWQEGNVFSCSVMHEALHNHYTQKSLSLSLGKM

SEQ ID NO: 7 - DNA, 690 bp, Artificial Sequence
  Description of Artificial Sequence: Synthetic polynucleotide
gagagcaagtacggccctccctgccccccttgccctgcccccgagttcctgggcggacccagcgtgttcctgttcccccccaagcccaaggacaccctgatgatcagccggacccccgaggtgacctgtgtggtggtggacgtgtcccaggaggaccccgaggtccagttcaactggtacgtggacggcgtggaggtgcacaacgccaagaccaagccccgggaggagcagttcaatagcacctaccgggtggtgtccgtgctgaccgtgctgcaccaggactggctgaacggcaaggaatacaagtgtaaggtgtccaacaagggcctgcccagcagcatcgagaaaaccatcagcaaggccaagggccagcctcgggagccccaggtgtacaccctgccccctagccaagaggagatgaccaagaaccaggtgtccctgacctgcctggtgaagggcttctaccccagcgacatcgccgtggagtgggagagcaacggccagcccgagaacaactacaagaccaccccccctgtgctggacagcgacggcagcttcttcctgtacagccggctgaccgtggacaagagccggtggcaggagggcaacgtctttagctgctccgtgatgcacgaggccctgcacaaccactacacccagaagagcctgagcctgtccctgggcaagatg

SEQ ID NO: 8 - protein, 282 aa, Artificial Sequence
  Description of Artificial Sequence: Synthetic polypeptide
RWPESPKAQASSVPTAQPQAEGSLAKATTAPATTRNTGRGGEEKKKEKEKEEQEERETKTPECPSHTQPLGVYLLTPAVQDLWLRDKATFTCFVVGSDLKDAHLTWEVAGKVPTGGVEEGLLERHSNGSQSQHSRLTLPRSLWNAGTSVTCTLNHPSLPPQRLMALREPAAQAPVKLSLNLLASSDPPEAASWLLCEVSGFSPPNILLMWLEDQREVNTSGFAPARPPPQPGSTTFWAWSVLRVPAPPSPQPATYTCVVSHEDSRTLLNASRSLEVSYVTDH

SEQ ID NO: 9 - DNA, 847 bp, Artificial Sequence
  Description of Artificial Sequence: Synthetic polynucleotide
aggtggcccgaaagtcccaaggcccaggcatctagtgttcctactgcacagccccaggcagaaggcagcctagccaaagctactactgcacctgccactacgcgcaatactggccgtggcggggaggagaagaaaaaggagaaagagaaagaagaacaggaagagagggagaccaagacccctgaatgtccatcccatacccagccgctgggcgtctatctcttgactcccgcagtacaggacttgtggcttagagataaggccacctttacatgtttcgtcgtgggctctgacctgaaggatgcccatttgacttgggaggttgccggaaaggtacccacagggggggttgaggaagggttgctggagcgccattccaatggctctcagagccagcactcaagactcacccttccgagatccctgtggaacgccgggacctctgtcacatgtactctaaatcatcctagcctgcccccacagcgtctgatggcccttagagagccagccgcccaggcaccagttaagcttagcctgaatctgctcgccagtagtgatcccccagaggccgccagctggctcttatgcgaagtgtccggctttagcccgcccaacatcttgctcatgtggctggaggaccagcgagaagtgaacaccagcggcttcgctccagcccggcccccaccccagccgggttctaccacattctgggcctggagtgtcttaagggtcccagcaccacctagcccccagccagccacatacacctgtgttgtgtcccatgaagatagcaggaccctgctaaatgcttctaggagtctggaggtttcctacgtgactgaccatt

SEQ ID NO: 10 - protein, 10 aa, Artificial Sequence
  Description of Artificial Sequence: Synthetic peptide
GGGGSGGGGS

SEQ ID NO: 11 - DNA, 30 bp, Artificial Sequence
  Description of Artificial Sequence: Synthetic oligonucleotide
ggtggcggaggttctggaggtggaggttcc

SEQ ID NO: 12 - protein, 24 aa, Artificial Sequence
  Description of Artificial Sequence: Synthetic peptide
IYIWAPLAGTCGVLLLSLVITLYC

SEQ ID NO: 13 - DNA, 72 bp, Artificial Sequence
  Description of Artificial Sequence: Synthetic oligonucleotide
atctacatctgggcgcccttggccgggacttgtggggtccttctcctgtcactggttatcaccctttactgc

SEQ ID NO: 14 - protein, 42 aa, Artificial Sequence
  Description of Artificial Sequence: Synthetic polypeptide
KRGRKKLLYIFKQPFMRPVQTTQEEDGCSCRFPEEEEGGCEL

SEQ ID NO: 15 - DNA, 126 bp, Artificial Sequence
  Description of Artificial Sequence: Synthetic polynucleotide
aaacggggcagaaagaaactcctgtatatattcaaacaaccatttatgagaccagtacaaactactcaagaggaagatggctgtagctgccgatttccagaagaagaagaaggaggatgtgaactg

SEQ ID NO: 16 - protein, 48 aa, Artificial Sequence
  Description of Artificial Sequence: Synthetic polypeptide
QRRKYRSNKGESPVEPAEPCRYSCPREEEGSTIPIQEDYRKPEPACSP

SEQ ID NO: 17 - DNA, 123 bp, Artificial Sequence
  Description of Artificial Sequence: Synthetic polynucleotide
aggagtaagaggagcaggctcctgcacagtgactacatgaacatgactccccgccgccccgggcccacccgcaagcattaccagccctatgccccaccacgcgacttcgcagcctatcgctcc

SEQ ID NO: 18 - protein, 112 aa, Artificial Sequence
  Description of Artificial Sequence: Synthetic polypeptide
RVKFSRSADAPAYKQGQNQLYNELNLGRREEYDVLDKRRGRDPEMGGKPRRKNPQEGLYNELQKDKMAEAYSEIGMKGERRRGKGHDGLYQGLSTATKDTYDALHMQALPPR

SEQ ID NO: 19 - DNA, 336 bp, Artificial Sequence
  Description of Artificial Sequence: Synthetic polynucleotide
agagtgaagttcagcaggagcgcagacgcccccgcgtacaagcagggccagaaccagctctataacgagctcaatctaggacgaagagaggagtacgatgttttggacaagagacgtggccgggaccctgagatggggggaaagccgagaaggaagaaccctcaggaaggcctgtacaatgaactgcagaaagataagatggcggaggcctacagtgagattgggatgaaaggcgagcgccggaggggcaaggggcacgatggcctttaccagggtctcagtacagccaccaaggacacctacgacgcccttcacatgcaggccctgccccctcgc

SEQ ID NO: 20 - protein, 112 aa, Artificial Sequence
  Description of Artificial Sequence: Synthetic polypeptide
RVKFSRSADAPAYQQGQNQLYNELNLGRREEYDVLDKRRGRDPEMGGKPRRKNPQEGLYNELQKDKMAEAYSEIGMKGERRRGKGHDGLYQGLSTATKDTYDALHMQALPPR

SEQ ID NO: 21 - DNA, 336 bp, Artificial Sequence
  Description of Artificial Sequence: Synthetic polynucleotide
agagtgaagttcagcaggagcgcagacgcccccgcgtaccagcagggccagaaccagctctataacgagctcaatctaggacgaagagaggagtacgatgttttggacaagagacgtggccgggaccctgagatggggggaaagccgagaaggaagaaccctcaggaaggcctgtacaatgaactgcagaaagataagatggcggaggcctacagtgagattgggatgaaaggcgagcgccggaggggcaaggggcacgatggcctttaccagggtctcagtacagccaccaaggacacctacgacgcccttcacatgcaggccctgccccctcgc

SEQ ID NO: 22 - protein, 5 aa, Artificial Sequence
  Description of Artificial Sequence: Synthetic peptide
GGGGS

SEQ ID NO: 23 - DNA, 30 bp, Artificial Sequence; identical to SEQ ID NO: 11
  Description of Artificial Sequence: Synthetic oligonucleotide

SEQ ID NO: 24 - protein, 150 aa, Artificial Sequence [sequence omitted]

SEQ ID NO: 25 - DNA, 450 bp, Artificial Sequence
  Description of Artificial Sequence: Synthetic polynucleotide
cccggatggtttctggactctccggatcgcccgtggaatcccccaaccttctcaccggcactcttggttgtgactgagggcgataatgcgaccttcacgtgctcgttctccaacacctccgaatcattcgtgctgaactggtaccgcatgagcccgtcaaaccagaccgacaagctcgccgcgtttccggaagatcggtcgcaaccgggacaggattgtcggttccgcgtgactcaactgccgaatggcagagacttccacatgagcgtggtccgcgctaggcgaaacgactccgggacctacctgtgcggagccatctcgctggcgcctaaggcccaaatcaaagagagcttgagggccgaactgagagtgaccgagcgcagagctgaggtgccaactgcacatccatccccatcgcctcggcctgcggggcagtttcagaccctggtc

SEQ ID NO: 26 - protein, 394 aa, Artificial Sequence
  Description of Artificial Sequence: Synthetic polypeptide
MALPVTALLLPLALLLHAARPPGWFLDSPDRPWNPPTFSPALLVVTEGDNATFTCSFSNTSESFVLNWYRMSPSNQTDKLAAFPEDRSQPGQDCRFRVTQLPNGRDFHMSVVRARRNDSGTYLCGAISLAPKAQIKESLRAELRVTERRAEVPTAHPSPSPRPAGQFQTLVTTTPAPRPPTPAPTIASQPLSLRPEACRPAAGGAVHTRGLDFACDIYIWAPLAGTCGVLLLSLVITLYCKRGRKKLLYIFKQPFMRPVQTTQEEDGCSCRFPEEEEGGCELRVKFSRSADAPAYKQGQNQLYNELNLGRREEYDVLDKRRGRDPEMGGKPRRKNPQEGLYNELQKDKMAEAYSEIGMKGERRRGKGHDGLYQGLSTATKDTYDALHMQALPPR

SEQ ID NO: 27 - DNA, 1182 bp, Artificial Sequence
  Description of Artificial Sequence: Synthetic polynucleotide
atggccctccctgtcactgccctgcttctccccctcgcactcctgctccacgccgctagaccacccggatggtttctggactctccggatcgcccgtggaatcccccaaccttctcaccggcactcttggttgtgactgagggcgataatgcgaccttcacgtgctcgttctccaacacctccgaatcattcgtgctgaactggtaccgcatgagcccgtcaaaccagaccgacaagctcgccgcgtttccggaagatcggtcgcaaccgggacaggattgtcggttccgcgtgactcaactgccgaatggcagagacttccacatgagcgtggtccgcgctaggcgaaacgactccgggacctacctgtgcggagccatctcgctggcgcctaaggcccaaatcaaagagagcttgagggccgaactgagagtgaccgagcgcagagctgaggtgccaactgcacatccatccccatcgcctcggcctgcggggcagtttcagaccctggtcacgaccactccggcgccgcgcccaccgactccggccccaactatcgcgagccagcccctgtcgctgaggccggaagcatgccgccctgccgccggaggtgctgtgcatacccggggattggacttcgcatgcgacatctacatttgggctcctctcgccggaacttgtggcgtgctccttctgtccctggtcatcaccctgtactgcaagcggggtcggaaaaagcttctgtacattttcaagcagcccttcatgaggcccgtgcaaaccacccaggaggaggacggttgctcctgccggttccccgaagaggaagaaggaggttgcgagctgcgcgtgaagttctcccggagcgccgacgcccccgcctataagcagggccagaaccagctgtacaacgaactgaacctgggacggcgggaagagtacgatgtgctggacaagcggcgcggccgggaccccgaaatgggcgggaagcctagaagaaagaaccctcaggaaggcctgtataacgagctgcagaaggacaagatggccgaggcctactccgaaattgggatgaagggagagcggcggaggggaaaggggcacgacggcctgtaccaaggactgtccaccgccaccaaggacacatacgatgccctgcacatgcaggcccttccccctcgc

SEQ ID NO: 28 - protein, 40 aa, Artificial Sequence
  Description of Artificial Sequence: Synthetic polypeptide
  MISC_FEATURE (1)..(40): This sequence may encompass 1-10 'Gly Gly Gly Ser' repeating units, wherein some positions may be absent
GGGSGGGSGGGSGGGSGGGSGGGSGGGSGGGSGGGSGGGS

SEQ ID NO: 29 - protein, 20 aa, Artificial Sequence
  Description of Artificial Sequence: Synthetic peptide
GGGGSGGGGSGGGGSGGGGS

SEQ ID NO: 30 - protein, 15 aa, Artificial Sequence
  Description of Artificial Sequence: Synthetic peptide
GGGGSGGGGSGGGGS

SEQ ID NO: 31 - protein, 4 aa, Artificial Sequence
  Description of Artificial Sequence: Synthetic peptide
GGGS

SEQ ID NO: 32 - DNA, 2000 bp, Artificial Sequence
  Description of Artificial Sequence: Synthetic polynucleotide
  misc_feature (1)..(2000): This sequence may encompass 50-2000 nucleotides, wherein some positions may be absent
aaaaaaaaaaaaaaaaaaaaaaaaaaaaaaaaaaaaaaaaaaaaaaaaaaaaaaaaaaaaaaaaaaaaaaaaaaaaaaaaaaaaaaaaaaaaaaaaaaaaaaaaaaaaaaaaaaaaaaaaaaaaaaaaaaaaaaaaaaaaaaaaaaaaaaaaaaaaaaaaaaaaaaaaaaaaaaaaaaaaaaaaaaaaaaaaaaaaaaaaaaaaaaaaaaaaaaaaaaaaaaaaaaaaaaaaaaaaaaaaaaaaaaaaaaaaaaaaaaaaaaaaaaaaaaaaaaaaaaaaaaaaaaaaaaaaaaaaaaaaaaaaaaaaaaaaaaaaaaaaaaaaaaaaaaaaaaaaaaaaaaaaaaaaaaaaaaaaaaaaaaaaaaaaaaaaaaaaaaaaaaaaaaaaaaaaaaaaaaaaaaaaaaaaaaaaaaaaaaaaaaaaaaaaaaaaaaaaaaaaaaaaaaaaaaaaaaaaaaaaaaaaaaaaaaaaaaaaaaaaaaaaaaaaaaaaaaaaaaaaaaaaaaaaaaaaaaaaaaaaaaaaaaaaaaaaaaaaaaaaaaaaaaaaaaaaaaaaaaaaaaaaaaaaaaaaaaaaaaaaaaaaaaaaaaaaaaaaaaaaaaaaaaaaaaaaaaaaaaaaaaaaaaaaaaaaaaaaaaaaaaaaaaaaaaaaaaaaaaaaaaaaaaaaaaaaaaaaaaaaaaaaaaaaaaaaaaaaaaaaaaaaaaaaaaaaaaaaaaaaaaaaaaaaaaaaaaaaaaaaaaaaaaaaaaaaaaaaaaaaaaaaaaaaaaaaaaaaaaaaaaaaaaaaaaaaaaaaaaaaaaaaaaaaaaaaaaaaaaaaaaaaaaaaaaaaaaaaaaaaaaaaaaaaaaaaaaaaaaaaaaaaaaaaaaaaaaaaaaaaaaaaaaaaaaaaaaaaaaaaaaaaaaaaaaaaaaaaaaaaaaaaaaaaaaaaaaaaaaaaaaaaaaaaaaaaaaaaaaaaaaaaaaaaaaaaaaaaaaaaaaaaaaaaaaaaaaaaaaaaaaaaaaaaaaaaaaaaaaaaaaaaaaaaaaaaaaaaaaaaaaaaaaaaaaaaaaaaaaaaaaaaaaaaaaaaaaaaaaaaaaaaaaaaaaaaaaaaaaaaaaaaaaaaaaaaaaaaaaaaaaaaaaaaaaaaaaaaaaaaaaaaaaaaaaaaaaaaaaaaaaaaaaaaaaaaaaaaaaaaaaaaaaaaaaaaaaaaaaaaaaaaaaaaaaaaaaaaaaaaaaaaaaaaaaaaaaaaaaaaaaaaaaaaaaaaaaaaaaaaaaaaaaaaaaaaaaaaaaaaaaaaaaaaaaaaaaaaaaaaaaaaaaaaaaaaaaaaaaaaaaaaaaaaaaaaaaaaaaaaaaaaaaaaaaaaaaaaaaaaaaaaaaaaaaaaaaaaaaaaaaaaaaaaaaaaaaaaaaaaaaaaaaaaaaaaaaaaaaaaaaaaaaaaaaaaaaaaaaaaaaaaaaaaaaaaaaaaaaaaaaaaaaaaaaaaaaaaaaaaaaaaaaaaaaaaaaaaaaaaaaaaaaaaaaaaaaaaaaaaaaaaaaaaaaaaaaaaaaaaaaaaaaaaaaaaaaaaaaaaaaaaaaaaaaaaaaaaaaaaaaaaaaaaaaaaaaaaaaaaaaaaaaaaaaaaaaaaaaaaaaaaaaaaaaaaaaaaaaaaaaaaaaaaaaaaaaaaaaaaaaaaaaaaaaaaaaaaaaaaaaaaaaaaaaaaaaaaaaaaaaaaaaaaaaaaaaaaaaaaaaaaaaaaaaaaaaaaaaaaaaaaaaaaaaaaaaaaaaaaaaaaaaaaaaaaaaaaaaaaaaaaaaaaaaaaaaaaaaaaaaaaaaaaaaaaaaaaaaaaaaaaaaaaaaaaaaaaaaaaaaaaaaaaaaaaaaaaaaaaaaaaaaaaaaaaaaaaaaaaaaaaaaaaaaaaaaaaaaaaaaaaaaaaaaaaaaaaaaaaaaaaaaaaaaaaaaaaaaaaaaaaaaaaaaaaaaaaaaaaaaaaaaaaaaaaaaaaaaaaaaaaaaaaaaaaaaaaaaaa

SEQ ID NO: 33 - skipped

SEQ ID NO: 34 - DNA, 5000 bp, Artificial Sequence
  Description of Artificial Sequence: Synthetic polynucleotide
  misc_feature (1)..(5000): This sequence may encompass 50-5000 nucleotides, wherein some positions may be absent
  See specification as filed for detailed description of substitutions and preferred embodiments
aaaaaaaaaaaaaaaaaaaaaaaaaaaaaaaaaaaaaaaaaaaaaaaaaaaaaaaaaaaaaaaaaaaaaaaaaaaaaaaaaaaaaaaaaaaaaaaaaaaaaaaaaaaaaaaaaaaaaaaaaaaaaaaaaaaaaaaaaaaaaaaaaaaaaaaaaaaaaaaaaaaaaaaaaaaaaaaaaaaaaaaaaaaaaaaaaaaaaaaaaaaaaaaaaaaaaaaaaaaaaaaaaaaaaaaaaaaaaaaaaaaaaaaaaaaaaaaaaaaaaaaaaaaaaaaaaaaaaaaaaaaaaaaaaaaaaaaaaaaaaaaaaaaaaaaaaaaaaaaaaaaaaaaaaaaaaaaaaaaaaaaaaaaaaaaaaaaaaaaaaaaaaaaaaaaaaaaaaaaaaaaaaaaaaaaaaaaaaaaaaaaaaaaaaaaaaaaaaaaaaaaaaaaaaaaaaaaaaaaaaaaaaaaaaaaaaaaaaaaaaaaaaaaaaaaaaaaaaaaaaaaaaaaaaaaaaaaaaaaaaaaaaaaaaaaaaaaaaaaaaaaaaaaaaaaaaaaaaaaaaaaaaaaaaaaaaaaaaaaaaaaaaaaaaaaaaaaaaaaaaaaaaaaaaaaaaaaaaaaaaaaaaaaaaaaaaaaaaaaaaaaaaaaaaaaaaaaaaaaaaaaaaaaaaaaaaaaaaaaaaaaaaaaaaaaaaaaaaaaaaaaaaaaaaaaaaaaaaaaaaaaaaaaaaaaaaaaaaaaaaaaaaaaaaaaaaaaaaaaaaaaaaaaaaaaaaaaaaaaaaaaaaaaaaaaaaaaaaaaaaaaaaaaaaaaaaaaaaaaaaaaaaaaaaaaaaaaaaaaaaaaaaaaaaaaaaaaaaaaaaaaaaaaaaaaaaaaaaaaaaaaaaaaaaaaaaaaaaaaaaaaaaaaaaaaaaaaaaaaaaaaaaaaaaaaaaaaaaaaaaaaaaaaaaaaaaaaaaaaaaaaaaaaaaaaaaaaaaaaaaaaaaaaaaaaaaaaaaaaaaaaaaaaaaaaaaaaaaaaaaaaaaaaaaaaaaaaaaaaaaaaaaaaaaaaaaaaaaaaaaaaaaaaaaaaaaaaaaaaaaaaaaaaaaaaaaaaaaaaaaaaaaaaaaaaaaaaaaaaaaaaaaaaaaaaaaaaaaaaaaaaaaaaaaaaaaaaaaaaaaaaaaaaaaaaaaaaaaaaaaaaaaaaaaaaaaaaaaaaaaaaaaaaaaaaaaaaaaaaaaaaaaaaaaaaaaaaaaaaaaaaaaaaaaaaaaaaaaaaaaaaaaaaaaaaaaaaaaaaaaaaaaaaaaaaaaaaaaaaaaaaaaaaaaaaaaaaaaaaaaaaaaaaaaaaaaaaaaaaaaaaaaaaaaaaaaaaaaaaaaaaaaaaaaaaaaaaaaaaaaaaaaaaaaaaaaaaaaaaaaaaaaaaaaaaaaaaaaaaaaaaaaaaaaaaaaaaaaaaaaaaaaaaaaaaaaaaaaaaaaaaaaaaaaaaaaaaaaaaaaaaaaaaaaaaaaaaaaaaaaaaaaaaaaaaaaaaaaaaaaaaaaaaaaaaaaaaaaaaaaaaaaaaaaaaaaaaaaaaaaaaaaaaaaaaaaaaaaaaaaaaaaaaaaaaaaaaaaaaaaaaaaaaaaaaaaaaaaaaaaaaaaaaaaaaaaaaaaaaaaaaaaaaaaaaaaaaaaaaaaaaaaaaaaaaaaaaaaaaaaaaaaaaaaaaaaaaaaaaaaaaaaaaaaaaaaaaaaaaaaaaaaaaaaaaaaaaaaaaaaaaaaaaaaaaaaaaaaaaaaaaaaaaaaaaaaaaaaaaaaaaaaaaaaaaaaaaaaaaaaaaaaaaaaaaaaaaaaaaaaaaaaaaaaaaaaaaaaaaaaaaaaaaaaaaaaaaaaaaaaaaaaaaaaaaaaaaaaaaaaaaaaaaaaaaaaaaaaaaaaaaaaaaaaaaaaaaaaaaaaaaaaaaaaaaaaaaaaaaaaaaaaaaaaaaaaaaaaaaaaaaaaaaaaaaaaaaaaaaaaaaaaaaaaaaaaaaaaaaaaaaaaaaaaaaaaaaaaaaaaaaaaaaaaaaaaaaaaaaaaaaaaaaaaaaaaaaaaaaaaaaaaaaaaaaaaaaaaaaaaaaaaaaaaaaaaaaaaaaaaaaaaaaaaaaaaaaaaaaaaaaaaaaaaaaaaaaaaaaaaaaaaaaaaaaaaaaaaaaaaaaaaaaaaaaaaaaaaaaaaaaaaaaaaaaaaaaaaaaaaaaaaaaaaaaaaaaaaaaaaaaaaaaaaaaaaaaaaaaaaaaaaaaaaaaaaaaaaaaaaaaaaaaaaaaaaaaaaaaaaaaaaaaaaaaaaaaaaaaaaaaaaaaaaaaaaaaaaaaaaaaaaaaaaaaaaaaaaaaaaaaaaaaaaaaaaaaaaaaaaaaaaaaaaaaaaaaaaaaaaaaaaaaaaaaaaaaaaaaaaaaaaaaaaaaaaaaaaaaaaaaaaaaaaaaaaaaaaaaaaaaaaaaaaaaaaaaaaaaaaaaaaaaaaaaaaaaaaaaaaaaaaaaaaaaaaaaaaaaaaaaaaaaaaaaaaaaaaaaaaaaaaaaaaaaaaaaaaaaaaaaaaaaaaaaaaaaaaaaaaaaaaaaaaaaaaaaaaaaaaaaaaaaaaaaaaaaaaaaaaaaaaaaaaaaaaaaaaaaaaaaaaaaaaaaaaaaaaaaaaaaaaaaaaaaaaaaaaaaaaaaaaaaaaaaaaaaaaaaaaaaaaaaaaaaaaaaaaaaaaaaaaaaaaaaaaaaaaaaaaaaaaaaaaaaaaaaaaaaaaaaaaaaaaaaaaaaaaaaaaaaaaaaaaaaaaaaaaaaaaaaaaaaaaaaaaaaaaaaaaaaaaaaaaaaaaaaaaaaaaaaaaaaaaaaaaaaaaaaaaaaaaaaaaaaaaaaaaaaaaaaaaaaaaaaaaaaaaaaaaaaaaaaaaaaaaaaaaaaaaaaaaaaaaaaaaaaaaaaaaaaaaaaaaaaaaaaaaaaaaaaaaaaaaaaaaaaaaaaaaaaaaaaaaaaaaaaaaaaaaaaaaaaaaaaaaaaaaaaaaaaaaaaaaaaaaaaaaaaaaaaaaaaaaaaaaaaaaaaaaaaaaaaaaaaaaaaaaaaaaaaaaaaaaaaaaaaaaaaaaaaaaaaaaaaaaaaaaaaaaaaaaaaaaaaaaaaaaaaaaaaaaaaaaaaaaaaaaaaaaaaaaaaaaaaaaaaaaaaaaaaaaaaaaaaaaaaaaaaaaaaaaaaaaaaaaaaaaaaaaaaaaaaaaaaaaaaaaaaaaaaaaaaaaaaaaaaaaaaaaaaaaaaaaaaaaaaaaaaaaaaaaaaaaaaaaaaaaaaaaaaaaaaaaaaaaaaaaaaaaaaaaaaaaaaaaaaaaaaaaaaaaaaaaaaaaaaaaaaaaaaaaaaaaaaaaaaaaaaaaaaaaaaaaaaaaaaaaaaaaaaaaaaaaaaaaaaaaaaaaaaaaaaaaaaaaaaaaaaaaaaaaaaaaaaaaaaaaaaaaaaaaaaaaaaaaaaaaaaaaaaaaaaaaaaaaaaaaaaaaaaaaaaaaaaaaaaaaaaaaaaaaaaaaaaaaaaaaaaaaaaaaaaaaaaaaaaaaaaaaaaaaaaaaaaaaaaaaaaaaaaaaaaaaaaaaaaaaaaaaaaaaaaaaaaaaaaaaaaaaaaaaaaaaaaaaaaaaaaaaaaaaaaaaaaaaaaaaaaaaaaaaaaaaaaaaaaaaaaaaaaaaaaaaaaaaaaaaaaaaaaaaaaaaaaaaaaaaaaaaaaaaaaaaaaaaaaaaaaaaaaaaaaaaaaaaaaaaaaaaaaaaaaaaaaaaaaaaaaaaaaaaaaaaaaaaaaaaaaaaaaaaaaaaaaaaaaaaaaaaaaaaaaaaaaaaaaaaaaaaaaaaaaaaaaaaaaaaaaaaaaaaaaaaaaaaaaaaaaaaaaaaaaaaaaaaaaaaaaaaaaaaaaaaaaaaaaaaaaaaaaaaaaaaaaaaaaaaaaaaaaaaaaaaaaaaaaaaaaaaaaaaaaaaaaaaaaaaaaaaaaaaaaaaaaaaaaaaaaaaaaaaaaaaaaaaaaaaaaaaaaaaaaaaaaaaaaaaaaaaaaaaaaaaaaaaaaaaaaaaaaaaaaaaaaaaaaaaaaaaaaaaaaaaaaaaaaaaaaaaaaaaaaaaaaaaaaaaaaaaaaaaaaaaaaaaaaaaaaaaaaaaaaaaaaaaaaaaaaaaaaaaaaaaaaaaaaaaaaaaaaaaaaaaaaaaaaaaaaaaaaaaaaaaaaaaaaaaaaaaaaaaaaaaaaaaaaaaaaaaaaaaaaaaaaaaaaaaaaaaaaaaaaaaaaaaaaaaaaaaaaaaaaaaaaaaaaaaaaaaaaaaaaaaaaaaaaaaaaaaaaaaaaaaaaaaaaaaaaaaaaaaaaaaaaaaaaaaaaaaaaaaaaaaaaaaaaaaaaaaaaaaaaaaaaaaaaaaaaaaaaaaaaaaaaaaaaaaaaaaaaaaaaaaaaaaaaaaaaaaaaaaaaaaaaaaaaaaaaaaaaaaaaaaaaaaaaaaaaaaaaaaaaaaaaaaaaaaaaaaaaaaaaaaaaaaaaaaaaaaaaaaaaaaaaaaaaaaaaaaaaaaaaaaaaaaaaaaaaaaaaaaaaaaaaaaaaaaaaaaaaaaaaaaaaaaaaaaaaaaaaaaaaaaaaaaaaaaaaaaaaaaaaaaaaaaaaaaaaaaaaaaaaaaaaaaaaaaaaaaaaaaaaaaaaaaaaaaaaaaaaaaaaaaaaaaaaaaaaaaaaaaaaaaaaaaaaaaaaaaaaaaaaaaaaaaaaaaaaaaaaaaaaaaaaaaaaaaaaaaaaaaaaaaaaaaaaaaaaaaaaaaaaaaaaaaaaaaaaaaaaaaaaaaaaaaaaaaaaaaaaaaaaaaaaaaaaaaaaaaaaaaaaaaaaaaaaaaaaaaaaaaaaaaaaaaaaaaaaaaaaaaaaaaaaaaaaaaaaaaaaaaaaaaaaaaaaaaaaaaaaaaaaaaaaaaaaaaaaaaaaaaaaaaaaaaaaaaaaaaaaaaaaaaaaaaaaaaaaaaaaaaaaaaaaaaaaaaaaaaaaaaaaaaaaaaaaaaaaaaaaaaaaaaaaaaaaaaaaa

SEQ ID NO: 35-38 - skipped (4 entries)

SEQ ID NO: 39 - protein, 373 aa, Artificial Sequence
  Description of Artificial Sequence: Synthetic polypeptide
PGWFLDSPDRPWNPPTFSPALLVVTEGDNATFTCSFSNTSESFVLNWYRMSPSNQTDKLAAFPEDRSQPGQDCRFRVTQLPNGRDFHMSVVRARRNDSGTYLCGAISLAPKAQIKESLRAELRVTERRAEVPTAHPSPSPRPAGQFQTLVTTTPAPRPPTPAPTIASQPLSLRPEACRPAAGGAVHTRGLDFACDIYIWAPLAGTCGVLLLSLVITLYCKRGRKKLLYIFKQPFMRPVQTTQEEDGCSCRFPEEEEGGCELRVKFSRSADAPAYKQGQNQLYNELNLGRREEYDVLDKRRGRDPEMGGKPRRKNPQEGLYNELQKDKMAEAYSEIGMKGERRRGKGHDGLYQGLSTATKDTYDALHMQALPPR

SEQ ID NO: 40 - protein, 852 aa, Homo sapiens
MLSGKKAAAAAAAAAAAATGTEAGPGTAGGSENGSEVAAQPAGLSGPAEVGPGAVGERTPRKKEPPRASPPGGLAEPPGSAGPQAGPTVVPGSATPMETGIAETPEGRRTSRRKRAKVEYREMDESLANLSEDEYYSEEERNAKAEKEKKLPPPPPQAPPEEENESEPEEPSGVEGAAFQSRLPHDRMTSQEAACFPDIISGPQQTQKVFLFIRNRTLQLWLDNPKIQLTFEATLQQLEAPYNSDTVLVHRVHSYLERHGLINFGIYKRIKPLPTKKTGKVIIIGSGVSGLAAARQLQSFGMDVTLLEARDRVGGRVATFRKGNYVADLGAMVVTGLGGNPMAVVSKQVNMELAKIKQKCPLYEANGQAVPKEKDEMVEQEFNRLLEATSYLSHQLDFNVLNNKPVSLGQALEVVIQLQEKHVKDEQIEHWKKIVKTQEELKELLNKMVNLKEKIKELHQQYKEASEVKPPRDITAEFLVKSKHRDLTALCKEYDELAETQGKLEEKLQELEANPPSDVYLSSRDRQILDWHFANLEFANATPLSTLSLKHWDQDDDFEFTGSHLTVRNGYSCVPVALAEGLDIKLNTAVRQVRYTASGCEVIAVNTRSTSQTFIYKCDAVLCTLPLGVLKQQPPAVQFVPPLPEWKTSAVQRMGFGNLNKVVLCFDRVFWDPSVNLFGHVGSTTASRGELFLFWNLYKAPILLALVAGEAAGIMENISDDVIVGRCLAILKGIFGSSAVPQPKETVVSRWRADPWARGSYSYVAAGSSGNDYDLMAQPITPGPSIPGAPQPIPRLFFAGEHTIRNYPATVHGALLSGLREAGRIADQFLGAMYTLPRQATPGVPAQQSPSM

SEQ ID NO: 41 - DNA, 3125 bp, Homo sapiens
ggcgcggcgggagcgcgcttggcgcgtgcgtacgcgacggcggttggcggcgcgcgggcagcgtgaagcgaggcgaggcaaggcttttcggacccacggagcgacagagcgagcggcccctacggccgtcggcggcccggcggcccgagatgttatctgggaagaaggcggcagccgcggcggcggcggctgcagcggcagcaaccgggacggaggctggccctgggacagcaggcggctccgagaacgggtctgaggtggccgcgcagcccgcgggcctgtcgggcccagccgaggtcgggccgggggcggtgggggagcgcacaccccgcaagaaagagcctccgcgggcctcgccccccgggggcctggcggaaccgccggggtccgcagggcctcaggccggccctactgtcgtgcctgggtctgcgacccccatggaaactggaatagcagagactccggaggggcgtcggaccagccggcgcaagcgggcgaaggtagagtacagagagatggatgaaagcttggccaacctctcagaagatgagtattattcagaagaagagagaaatgccaaagcagagaaggaaaagaagcttcccccaccaccccctcaagccccacctgaggaagaaaatgaaagtgagcctgaagaaccatcggggcaagcaggaggacttcaagacgacagttctggagggtatggagacggccaagcatcaggtgtggagggcgcagctttccagagccgacttcctcatgaccggatgacttctcaagaagcagcctgttttccagatattatcagtggaccacaacagacccagaaggtttttcttttcattagaaaccgcacactgcagttgtggttggataatccaaagattcagctgacatttgaggctactctccaacaattagaagcaccttataacagtgatactgtgcttgtccaccgagttcacagttatttagagcgtcatggtcttatcaacttcggcatctataagaggataaaacccctaccaactaaaaagacaggaaaggtaattattataggctctggggtctcaggcttggcagcagctcgacagttacaaagttttggaatggatgtcacacttttggaagccagggatcgtgtgggtggacgagttgccacatttcgcaaaggaaactatgtagctgatcttggagccatggtggtaacaggtcttggagggaatcctatggctgtggtcagcaaacaagtaaatatggaactggccaagatcaagcaaaaatgcccactttatgaagccaacggacaagctgacactgtcaaggttcctaaagagaaagatgaaatggtagagcaagagtttaaccggttgctagaagctacatcttaccttagtcatcaactagacttcaatgtcctcaataataagcctgtgtcccttggccaggcattggaagttgtcattcagttacaagagaagcatgtcaaagatgagcagattgaacattggaagaagatagtgaaaactcaggaagaattgaaagaacttcttaataagatggtaaatttgaaagagaaaattaaagaactccatcagcaatacaaagaagcatctgaagtaaagccacccagagatattactgccgagttcttagtgaaaagcaaacacagggatctgaccgccctatgcaaggaatatgatgaattagctgaaacacaaggaaagctagaagaaaaacttcaggagttggaagcgaatcccccaagtgatgtatatctctcatcaagagacagacaaatacttgattggcattttgcaaatcttgaatttgctaatgccacacctctctcaactctctcccttaagcactgggatcaggatgatgactttgagttcactggcagccacctgacagtaaggaatggctactcgtgtgtgcctgtggctttagcagaaggcctagacattaaactgaatacagcagtgcgacaggttcgctacacggcttcaggatgtgaagtgatagctgtgaatacccgctccacgagtcaaacctttatttataaatgcgacgcagttctctgtacccttcccctgggtgtgctgaagcagcagccaccagccgttcagtttgtgccacctctccctgagtggaaaacatctgcagtccaaaggatgggatttggcaaccttaacaaggtggtgttgtgttttgatcgggtgttctgggatccaagtgtcaatttgttcgggcatgttggcagtacgactgccagcaggggtgagctcttcctcttctggaacctctataaagctccaatactgttggcactagtggcaggagaagctgctggtatcatggaaaacataagtgacgatgtgattgttggccgatgcctggccattctcaaagggatttttggtagcagtgcagtacctcagcccaaagaaactgtggtgtctcgttggcgtgctgatccctgggctcggggctcttattcctatgttgctgcaggatcatctggaaatgactatgatttaatggctcagccaatcactcctggcccctcgattccaggtgccccacagccgattccacgactcttctttgcgggagaacatacgatccgtaactacccagccacagtgcatggtgctctgctgagtgggctgcgagaagcgggaagaattgcagaccagtttttgggggccatgtatacgctgcctcgccaggccacaccaggtgttcctgcacagcagtccccaagcatgtgagacagatgcattctaagggaagaggcccatgtgcctgtttctgccatgtaaggaaggctcttctagcaatactagatcccactgagaaaatccaccctggcatctgggctcctgatcagctgatggagctcctgatttgacaaaggagcttgcctcctttgaatgacctagagcacagggaggaacttgtccattagtttggaattgtgttcttcgtaaagactgaggcaagcaagtgctgtgaaataacatcatcttagtcccttggtgtgtggggtttttgttttttttttatattttgagaataaaacttcatataaaattggcaaaaaaaaaaaaaaaaaa

SEQ ID NO: 42 - DNA, 3053 bp, Homo sapiens
ggcgcggcgggagcgcgcttggcgcgtgcgtacgcgacggcggttggcggcgcgcgggcagcgtgaagcgaggcgaggcaaggcttttcggacccacggagcgacagagcgagcggcccctacggccgtcggcggcccggcggcccgagatgttatctgggaagaaggcggcagccgcggcggcggcggctgcagcggcagcaaccgggacggaggctggccctgggacagcaggcggctccgagaacgggtctgaggtggccgcgcagcccgcgggcctgtcgggcccagccgaggtcgggccgggggcggtgggggagcgcacaccccgcaagaaagagcctccgcgggcctcgccccccgggggcctggcggaaccgccggggtccgcagggcctcaggccggccctactgtcgtgcctgggtctgcgacccccatggaaactggaatagcagagactccggaggggcgtcggaccagccggcgcaagcgggcgaaggtagagtacagagagatggatgaaagcttggccaacctctcagaagatgagtattattcagaagaagagagaaatgccaaagcagagaaggaaaagaagcttcccccaccaccccctcaagccccacctgaggaagaaaatgaaagtgagcctgaagaaccatcgggtgtggagggcgcagctttccagagccgacttcctcatgaccggatgacttctcaagaagcagcctgttttccagatattatcagtggaccacaacagacccagaaggtttttcttttcattagaaaccgcacactgcagttgtggttggataatccaaagattcagctgacatttgaggctactctccaacaattagaagcaccttataacagtgatactgtgcttgtccaccgagttcacagttatttagagcgtcatggtcttatcaacttcggcatctataagaggataaaacccctaccaactaaaaagacaggaaaggtaattattataggctctggggtctcaggcttggcagcagctcgacagttacaaagttttggaatggatgtcacacttttggaagccagggatcgtgtgggtggacgagttgccacatttcgcaaaggaaactatgtagctgatcttggagccatggtggtaacaggtcttggagggaatcctatggctgtggtcagcaaacaagtaaatatggaactggccaagatcaagcaaaaatgcccactttatgaagccaacggacaagctgttcctaaagagaaagatgaaatggtagagcaagagtttaaccggttgctagaagctacatcttaccttagtcatcaactagacttcaatgtcctcaataataagcctgtgtcccttggccaggcattggaagttgtcattcagttacaagagaagcatgtcaaagatgagcagattgaacattggaagaagatagtgaaaactcaggaagaattgaaagaacttcttaataagatggtaaatttgaaagagaaaattaaagaactccatcagcaatacaaagaagcatctgaagtaaagccacccagagatattactgccgagttcttagtgaaaagcaaacacagggatctgaccgccctatgcaaggaatatgatgaattagctgaaacacaaggaaagctagaagaaaaacttcaggagttggaagcgaatcccccaagtgatgtatatctctcatcaagagacagacaaatacttgattggcattttgcaaatcttgaatttgctaatgccacacctctctcaactctctcccttaagcactgggatcaggatgatgactttgagttcactggcagccacctgacagtaaggaatggctactcgtgtgtgcctgtggctttagcagaaggcctagacattaaactgaatacagcagtgcgacaggttcgctacacggcttcaggatgtgaagtgatagctgtgaatacccgctccacgagtcaaacctttatttataaatgcgacgcagttctctgtacccttcccctgggtgtgctgaagcagcagccaccagccgttcagtttgtgccacctctccctgagtggaaaacatctgcagtccaaaggatgggatttggcaaccttaacaaggtggtgttgtgttttgatcgggtgttctgggatccaagtgtcaatttgttcgggcatgttggcagtacgactgccagcaggggtgagctcttcctcttctggaacctctataaagctccaatactgttggcactagtggcaggagaagctgctggtatcatggaaaacataagtgacgatgtgattgttggccgatgcctggccattctcaaagggatttttggtagcagtgcagtacctcagcccaaagaaactgtggtgtctcgttggcgtgctgatccctgggctcggggctcttattcctatgttgctgcaggatcatctggaaatgactatgatttaatggctcagccaatcactcctggcccctcgattccaggtgccccacagccgattccacgactcttctttgcgggagaacatacgatccgtaactacccagccacagtgcatggtgctctgctgagtgggctgcgagaagcgggaagaattgcagaccagtttttgggggccatgtatacgctgcctcgccaggccacaccaggtgttcctgcacagcagtccccaagcatgtgagacagatgcattctaagggaagaggcccatgtgcctgtttctgccatgtaaggaaggctcttctagcaatactagatcccactgagaaaatccaccctggcatctgggctcctgatcagctgatggagctcctgatttgacaaaggagcttgcctcctttgaatgacctagagcacagggaggaacttgtccattagtttggaattgtgttcttcgtaaagactgaggcaagcaagtgctgtgaaataacatcatcttagtcccttggtgtgtggggtttttgttttttttttatattttgagaataaaacttcatataaaattggcaaaaaaaaaaaaaaaaaa

SEQ ID NO: 43 - DNA, 21 bp, Artificial Sequence
  Description of Artificial Sequence: Synthetic oligonucleotide
ccgagttcacagttatttaga

SEQ ID NO: 44 - DNA, 21 bp, Artificial Sequence
  Description of Artificial Sequence: Synthetic oligonucleotide
cggacaagctgttcctaaaga

SEQ ID NO: 45 - DNA, 21 bp, Artificial Sequence
  Description of Artificial Sequence: Synthetic oligonucleotide
gaattgtgttcttcgtaaaga

SEQ ID NO: 46 - DNA, 21 bp, Artificial Sequence
  Description of Artificial Sequence: Synthetic oligonucleotide
ccaccgagttcacagttattt

SEQ ID NO: 47 - DNA, 21 bp, Artificial Sequence
  Description of Artificial Sequence: Synthetic oligonucleotide
caggaaaggtaattattatag

SEQ ID NO: 48 - DNA, 21 bp, Artificial Sequence
  Description of Artificial Sequence: Synthetic oligonucleotide
gcctgtttctgccatgtaagg

SEQ ID NO: 49 - DNA, 21 bp, Artificial Sequence
  Description of Artificial Sequence: Synthetic oligonucleotide
gacaggaaaggtaattattat

SEQ ID NO: 50 - DNA, 21 bp, Artificial Sequence
  Description of Artificial Sequence: Synthetic oligonucleotide
agctgttcctaaagagaaaga

SEQ ID NO: 51 - DNA, 21 bp, Artificial Sequence
  Description of Artificial Sequence: Synthetic oligonucleotide
cgagtcaaacctttatttata

SEQ ID NO: 52 - DNA, 21 bp, Artificial Sequence
  Description of Artificial Sequence: Synthetic oligonucleotide
ggctactctccaacaattaga

SEQ ID NO: 53 - DNA, 21 bp, Artificial Sequence
  Description of Artificial Sequence: Synthetic oligonucleotide
gcagctcgacagttacaaagt

SEQ ID NO: 54 - DNA, 21 bp, Artificial Sequence
  Description of Artificial Sequence: Synthetic oligonucleotide
cagaaggcctagacattaaac

SEQ ID NO: 55 - DNA, 21 bp, Artificial Sequence
  Description of Artificial Sequence: Synthetic oligonucleotide
agatgagtattattcagaaga

SEQ ID NO: 56 - DNA, 21 bp, Artificial Sequence
  Description of Artificial Sequence: Synthetic oligonucleotide
caattagaagcaccttataac

SEQ ID NO: 57 - DNA, 21 bp, Artificial Sequence
  Description of Artificial Sequence: Synthetic oligonucleotide
ggaacttgtccattagtttgg

SEQ ID NO: 58 - DNA, 21 bp, Artificial Sequence
  Description of Artificial Sequence: Synthetic oligonucleotide
gcaccttataacagtgatact

SEQ ID NO: 59 - DNA, 21 bp, Artificial Sequence
  Description of Artificial Sequence: Synthetic oligonucleotide
ggcatctataagaggataaaa

SEQ ID NO: 60 - DNA, 21 bp, Artificial Sequence
  Description of Artificial Sequence: Synthetic oligonucleotide
cattggaagttgtcattcagt

SEQ ID NO: 61 - DNA, 21 bp, Artificial Sequence
  Description of Artificial Sequence: Synthetic oligonucleotide
tggaaatgactatgatttaat

SEQ ID NO: 62 - DNA, 21 bp, Artificial Sequence
  Description of Artificial Sequence: Synthetic oligonucleotide
cggttgctagaagctacatct

SEQ ID NO: 63 - DNA, 21 bp, Artificial Sequence
  Description of Artificial Sequence: Synthetic oligonucleotide
gccacatttcgcaaaggaaac

SEQ ID NO: 64 - DNA, 21 bp, Artificial Sequence
  Description of Artificial Sequence: Synthetic oligonucleotide
cctcatgaccggatgacttct

SEQ ID NO: 65 - DNA, 21 bp, Artificial Sequence
  Description of Artificial Sequence: Synthetic oligonucleotide
cgagttgccacatttcgcaaa

SEQ ID NO: 66 - DNA, 21 bp, Artificial Sequence
  Description of Artificial Sequence: Synthetic oligonucleotide
cgtcatggtcttatcaacttc

SEQ ID NO: 67 - DNA, 21 bp, Artificial Sequence
  Description of Artificial Sequence: Synthetic oligonucleotide
gagcgtcatggtcttatcaac

SEQ ID NO: 68 - DNA, 21 bp, Artificial Sequence
  Description of Artificial Sequence: Synthetic oligonucleotide
ccggatgacttctcaagaagc

SEQ ID NO: 69 - DNA, 21 bp, Artificial Sequence
  Description of Artificial Sequence: Synthetic oligonucleotide
cacagggaggaacttgtccat

SEQ ID NO: 70 - DNA, 21 bp, Artificial Sequence
  Description of Artificial Sequence: Synthetic oligonucleotide
gcctcctttgaatgacctaga

SEQ ID NO: 71 - DNA, 21 bp, Artificial Sequence
  Description of Artificial Sequence: Synthetic oligonucleotide
cctatggctgtggtcagcaaa

SEQ ID NO: 72 - DNA, 21 bp, Artificial Sequence
  Description of Artificial Sequence: Synthetic oligonucleotide
gagcttgcctcctttgaatga

SEQ ID NO: 73 - DNA, 21 bp, Artificial Sequence
  Description of Artificial Sequence: Synthetic oligonucleotide
caggtcttggagggaatccta

SEQ ID NO: 74 - DNA, 21 bp, Artificial Sequence
  Description of Artificial Sequence: Synthetic oligonucleotide
cagtacctcagcccaaagaaa

SEQ ID NO: 75 - DNA, 21 bp, Artificial Sequence
  Description of Artificial Sequence: Synthetic oligonucleotide
ctggccattctcaaagggatt

SEQ ID NO: 76 - DNA, 21 bp, Artificial Sequence
  Description of Artificial Sequence: Synthetic oligonucleotide
gccatggtggtaacaggtctt

SEQ ID NO: 77 - DNA, 21 bp, Artificial Sequence
  Description of Artificial Sequence: Synthetic oligonucleotide
caggagaagctgctggtatca

SEQ ID NO: 78 - DNA, 21 bp, Artificial Sequence
  Description of Artificial Sequence: Synthetic oligonucleotide
ccacgagtcaaacctttattt

SEQ ID NO: 79 - DNA, 21 bp, Artificial Sequence
  Description of Artificial Sequence: Synthetic oligonucleotide
gctacatcttaccttagtcat

SEQ ID NO: 80 - DNA, 21 bp, Artificial Sequence
  Description of Artificial Sequence: Synthetic oligonucleotide
ccggatgacttctcaagaagc

SEQ ID NO: 81 - DNA, 21 bp, Artificial Sequence
  Description of Artificial Sequence: Synthetic oligonucleotide
gctccaatactgttggcacta

SEQ ID NO: 82 - DNA, 21 bp, Artificial Sequence
  Description of Artificial Sequence: Synthetic oligonucleotide
ccaacaattagaagcacctta

SEQ ID NO: 83 - DNA, 112 bp, Artificial Sequence
  Description of Artificial Sequence: Synthetic polynucleotide
ccgagttcacagttatttagactcgagtctaaataactgtgaactcggttttttgaattcgcaccagcacgctacgcaacacgttgacgttgaccacatgttcgccgtcttc

SEQ ID NO: 84 - DNA, 112 bp, Artificial Sequence
  Description of Artificial Sequence: Synthetic polynucleotide
cggacaagctgttcctaaagactcgagtctttaggaacagcttgtccgttttttgaattcgcaccagcacgctacgcagtcagttgacgttgaccaacgtttcgccgtcttc

SEQ ID NO: 85 - DNA, 112 bp, Artificial Sequence
  Description of Artificial Sequence: Synthetic polynucleotide
gaattgtgttcttcgtaaagactcgagtctttacgaagaacacaattcttttttgaattcgcaccagcacgctacgcatgacgttgacgttgaccaaccattcgccgtcttc

SEQ ID NO: 86 - DNA, 112 bp, Artificial Sequence
  Description of Artificial Sequence: Synthetic polynucleotide
ccaccgagttcacagttatttctcgagaaataactgtgaactcggtggttttttgaattcgcaccagcacgctacgcaacgtgttgacgttgaccaacacttcgccgtcttc

SEQ ID NO: 87 - DNA, 112 bp, Artificial Sequence
  Description of Artificial Sequence: Synthetic polynucleotide
caggaaaggtaattattatagctcgagctataataattacctttcctgttttttgaattcgcaccagcacgctacgcacatggttgacgttgaccaactgttcgccgtcttc

SEQ ID NO: 88 - DNA, 112 bp, Artificial Sequence
  Description of Artificial Sequence: Synthetic polynucleotide
gcctgtttctgccatgtaaggctcgagccttacatggcagaaacaggcttttttgaattcgcaccagcacgctacgcatgacgttgacgttgaccatggtttcgccgtcttc

SEQ ID NO: 89 - DNA, 112 bp, Artificial Sequence
  Description of Artificial Sequence: Synthetic polynucleotide
gacaggaaaggtaattattatctcgagataataattacctttcctgtcttttttgaattcgcaccagcacgctacgcaactggttgacgttgaccatgcattcgccgtcttc

SEQ ID NO: 90 - DNA, 112 bp, Artificial Sequence
  Description of Artificial Sequence: Synthetic polynucleotide
agctgttcctaaagagaaagactcgagtctttctctttaggaacagctttttttgaattcgcaccagcacgctacgcacacagttgacgttgaccatgacttcgccgtcttc

SEQ ID NO: 91 - DNA, 112 bp, Artificial Sequence
  Description of Artificial Sequence: Synthetic polynucleotide
cgagtcaaacctttatttatactcgagtataaataaaggtttgactcgttttttgaattcgcaccagcacgctacgcagtgtgttgacgttgaccatgtgttcgccgtcttc

SEQ ID NO: 92 - DNA, 112 bp, Artificial Sequence
  Description of Artificial Sequence: Synthetic polynucleotide
ggctactctccaacaattagactcgagtctaattgttggagagtagccttttttgaattcgcaccagcacgctacgcagtacgttgacgttgacacgtgtttcgccgtcttc

SEQ ID NO: 93 - DNA, 112 bp, Artificial Sequence
  Description of Artificial Sequence: Synthetic polynucleotide
gcagctcgacagttacaaagtctcgagactttgtaactgtcgagctgcttttttgaattcgcaccagcacgctacgcatgtggttgacgttgacacgtcattcgccgtcttc

SEQ ID NO: 94 - DNA, 112 bp, Artificial Sequence
  Description of Artificial Sequence: Synthetic polynucleotide
cagaaggcctagacattaaacctcgaggtttaatgtctaggccttctgttttttgaattcgcaccagcacgctacgcaaccagttgacgttgacacgtacttcgccgtcttc

SEQ ID NO: 95 - DNA, 112 bp, Artificial Sequence
  Description of Artificial Sequence: Synthetic polynucleotide
agatgagtattattcagaagactcgagtcttctgaataatactcatctttttttgaattcgcaccagcacgctacgcacagtgttgacgttgacacgttgttcgccgtcttc

SEQ ID NO: 96 - DNA, 112 bp, Artificial Sequence
  Description of Artificial Sequence: Synthetic polynucleotide
caattagaagcaccttataacctcgaggttataaggtgcttctaattgttttttgaattcgcaccagcacgctacgcatgtggttgacgttgacaccagtttcgccgtcttc

SEQ ID NO: 97 - DNA, 112 bp, Artificial Sequence
  Description of Artificial Sequence: Synthetic polynucleotide
ggaacttgtccattagtttggctcgagccaaactaatggacaagttccttttttgaattcgcaccagcacgctacgcaacgtgttgacgttgacaccacattcgccgtcttc

SEQ ID NO: 98 - DNA, 112 bp, Artificial Sequence
  Description of Artificial Sequence: Synthetic polynucleotide
gcaccttataacagtgatactctcgagagtatcactgttataaggtgcttttttgaattcgcaccagcacgctacgcacaacgttgacgttgacaccaacttcgccgtcttc

SEQ ID NO: 99 - DNA, 112 bp, Artificial Sequence
  Description of Artificial Sequence: Synthetic polynucleotide
ggcatctataagaggataaaactcgagttttatcctcttatagatgccttttttgaattcgcaccagcacgctacgcagtcagttgacgttgacaccatgttcgccgtcttc

SEQ ID NO: 100 - DNA, 112 bp, Artificial Sequence
  Description of Artificial Sequence: Synthetic polynucleotide
cattggaagttgtcattcagtctcgagactgaatgacaacttccaatgttttttgaattcgcaccagcacgctacgcaacgtgttgacgttgacacacgtttcgccgtcttc

SEQ ID NO: 101 - DNA, 112 bp, Artificial Sequence
  Description of Artificial Sequence: Synthetic polynucleotide
tggaaatgactatgatttaatctcgagattaaatcatagtcatttccattttttgaattcgcaccagcacgctacgcacacagttgacgttgacacaccattcgccgtcttc

SEQ ID NO: 102 - DNA, 130 bp, Artificial Sequence
  Description of Artificial Sequence: Synthetic polynucleotide
gaagacgcaccggcggttgctagaagttacatttgttaatattcatagcagatgtagcttctagcaaccgttttttgaattcgcaccagcacgctacgcaacgtgtcacagtacactgcaacttcgccgt

SEQ ID NO: 103 - DNA, 130 bp, Artificial Sequence
  Description of Artificial Sequence: Synthetic polynucleotide
gaagacgcaccgggccacatttcgtaaaggaaatgttaatattcatagcgtttcctttgcgaaatgtggcttttttgaattcgcaccagcacgctacgcatgacgtcacagtacactgcacattcgccgt

SEQ ID NO: 104 - DNA, 130 bp, Artificial Sequence
  Description of Artificial Sequence: Synthetic polynucleotide
gaagacgcaccggcctcatgactggatgatttctgttaatattcatagcagaagtcatccggtcatgaggttttttgaattcgcaccagcacgctacgcagtcagtcacagtacactgcagtttcgccgt

SEQ ID NO: 105 - DNA, 130 bp, Artificial Sequence
  Description of Artificial Sequence: Synthetic polynucleotide
gaagacgcaccggcgagttgccatatttcgtaaagttaatattcatagctttgcgaaatgtggcaactcgttttttgaattcgcaccagcacgctacgcaacacgtcacagtacactggttgttcgccgt

SEQ ID NO: 106 - DNA, 130 bp, Artificial Sequence
  Description of Artificial Sequence: Synthetic polynucleotide
gaagacgcaccggcgtcatggtcttatcaatttcgttaatattcatagcgaagttgataagaccatgacgttttttgaattcgcaccagcacgctacgcatgtggtcacagtacactggtacttcgccgt

SEQ ID NO: 107 - DNA, 130 bp, Artificial Sequence
  Description of Artificial Sequence: Synthetic polynucleotide
gaagacgcaccgggagcgttatggtcttattaacgttaatattcatagcgttgataagaccatgacgctcttttttgaattcgcaccagcacgctacgcagtcagtcacagtacactggtcattcgccgt

SEQ ID NO: 108 - DNA, 130 bp, Artificial Sequence
  Description of Artificial Sequence: Synthetic polynucleotide
gaagacgcaccggccggatgacttcttaagaagtgttaatattcatagcgcttcttgagaagtcatccggttttttgaattcgcaccagcacgctacgcacagtgtcacagtacactggtgtttcgccgt

SEQ ID NO: 109 - DNA, 130 bp, Artificial Sequence
  Description of Artificial Sequence: Synthetic polynucleotide
gaagacgcaccggcacagggaggaatttgtctatgttaatattcatagcatggacaagttcctccctgtgttttttgaattcgcaccagcacgctacgcagtacgtcacagtacacactgtgttcgccgt

SEQ ID NO: 110 - DNA, 130 bp, Artificial Sequence
  Description of Artificial Sequence: Synthetic polynucleotide
gaagacgcaccgggccttctttgaatgacttagagttaatattcatagctctaggtcattcaaaggaggcttttttgaattcgcaccagcacgctacgcacatggtcacagtacacactgacttcgccgt

SEQ ID NO: 111 - DNA, 130 bp, Artificial Sequence
  Description of Artificial Sequence: Synthetic polynucleotide
gaagacgcaccggcctatggttgtggtcagtaaagttaatattcatagctttgctgaccacagccataggttttttgaattcgcaccagcacgctacgcaaccagtcacagtacacactgcattcgccgt

SEQ ID NO: 112 - DNA, 130 bp, Artificial Sequence
  Description of Artificial Sequence: Synthetic polynucleotide
gaagacgcaccgggagcttgtgttctttgaatgagttaatattcatagctcattcaaaggaggcaagctcttttttgaattcgcaccagcacgctacgcatggtgtcacagtacacactggtttcgccgt

SEQ ID NO: 113 - DNA, 130 bp, Artificial Sequence
  Description of Artificial Sequence: Synthetic polynucleotide
gaagacgcaccggcaggtcttggaggggatcttagttaatattcatagctaggattccctccaagacctgttttttgaattcgcaccagcacgctacgcacacagtcacagtacacacactgttcgccgt

SEQ ID NO: 114 - DNA, 130 bp, Artificial Sequence
  Description of Artificial Sequence: Synthetic polynucleotide
gaagacgcaccggcagtacttcagcctaaagaaagttaatattcatagctttctttgggctgaggtactgttttttgaattcgcaccagcacgctacgcaacacgtcacagtacacacacacttcgccgt

SEQ ID NO: 115 - DNA, 130 bp, Artificial Sequence
  Description of Artificial Sequence: Synthetic polynucleotide
gaagacgcaccggctggctattcttaaagggattgttaatattcatagcaatccctttgagaatggccagttttttgaattcgcaccagcacgctacgcatggtgtcacagtacacacaccattcgccgt

SEQ ID NO: 116 - DNA, 130 bp, Artificial Sequence
  Description of Artificial Sequence: Synthetic polynucleotide
gaagacgcaccgggccatggtggtaataggtcttgttaatattcatagcaagacctgttaccaccatggcttttttgaattcgcaccagcacgctacgcagttggtcacagtacacacacgtttcgccgt

SEQ ID NO: 117 - DNA, 130 bp, Artificial Sequence
  Description of Artificial Sequence: Synthetic polynucleotide
gaagacgcaccggcaggagaagctgttggtattagttaatattcatagctgataccagcagcttctcctgttttttgaattcgcaccagcacgctacgcaacgtgtcacagtacacaccatgttcgccgt

SEQ ID NO: 118 - DNA, 130 bp, Artificial Sequence
  Description of Artificial Sequence: Synthetic polynucleotide
gaagacgcaccggccacgagtcaaatctttatttgttaatattcatagcaaataaaggtttgactcgtggttttttgaattcgcaccagcacgctacgcacacagtgttgtggtcacaacgtttcgccgt

SEQ ID NO: 119 - DNA, 130 bp, Artificial Sequence
  Description of Artificial Sequence: Synthetic polynucleotide
gaagacgcaccgggctacatcttaccttagttatgttaatattcatagcatgactaaggtaagatgtagcttttttgaattcgcaccagcacgctacgcatgacgtgttgtggtcacacatgttcgccgt

SEQ ID NO: 120 - DNA, 112 bp, Artificial Sequence
  Description of Artificial Sequence: Synthetic polynucleotide
ccggatgacttctcaagaagcctcgaggcttcttgagaagtcatccggttttttgaattcgcaccagcacgctacgcagttggttgacgttgacacacacttcgccgtcttc

SEQ ID NO: 121 - DNA, 130 bp, Artificial Sequence
  Description of Artificial Sequence: Synthetic polynucleotide
gaagacgcaccgggctccaatattgttggcattagttaatattcatagctagtgccaacagtattggagcttttttgaattcgcaccagcacgctacgcacacagtgttgtggtcacacacattcgccgt

SEQ ID NO: 122 - DNA, 130 bp, Artificial Sequence
  Description of Artificial Sequence: Synthetic polynucleotide
gaagacgcaccggccaacaattagaagcatcttagttaatattcatagctaaggtgcttctaattgttggttttttgaattcgcaccagcacgctacgcagttggtgttgtggtcacacaacttcgccgt

SEQ ID NO: 123 - DNA, 56 bp, Artificial Sequence
  Description of Artificial Sequence: Synthetic oligonucleotide
gccggcagctagcgacgccatctcgagatggcgtcgctagctgccggcttttttga

SEQ ID NO: 124 - DNA, 56 bp, Artificial Sequence
  Description of Artificial Sequence: Synthetic oligonucleotide
cctaaggttaagtcgccctcgctcgagcgagggcgacttaaccttaggttttttga

SEQ ID NO: 125 - DNA, 65 bp, Artificial Sequence
  Description of Artificial Sequence: Synthetic oligonucleotide
cggttgctagaagctacatctgttaatattcatagcagatgtagcttctagcaaccgttttttga

SEQ ID NO: 126 - DNA, 65 bp, Artificial Sequence
  Description of Artificial Sequence: Synthetic oligonucleotide
cggttgctagaagttacatttgttaatattcatagcagatgtagcttctagcaaccgttttttga

SEQ ID NO: 127 - DNA, 56 bp, Artificial Sequence
  Description of Artificial Sequence: Synthetic oligonucleotide
cagaaggcctagacattaaacctcgaggtttaatgtctaggccttctgttttttga

SEQ ID NO: 128 - DNA, 65 bp, Artificial Sequence
  Description of Artificial Sequence: Synthetic oligonucleotide
gccacatttcgcaaaggaaacgttaatattcatagcgtttcctttgcgaaatgtggcttttttga

SEQ ID NO: 129 - DNA, 65 bp, Artificial Sequence
  Description of Artificial Sequence: Synthetic oligonucleotide
gccacatttcgtaaaggaaatgttaatattcatagcgtttcctttgcgaaatgtggcttttttga

SEQ ID NO: 130 - DNA, 56 bp, Artificial Sequence
  Description of Artificial Sequence: Synthetic oligonucleotide
cggacaagctgttcctaaagactcgagtctttaggaacagcttgtccgttttttga

SEQ ID NO: 131 - DNA, 65 bp, Artificial Sequence
  Description of Artificial Sequence: Synthetic oligonucleotide
cgagttgccacatttcgcaaagttaatattcatagctttgcgaaatgtggcaactcgttttttga

SEQ ID NO: 132 - RNA, 20 nt, Artificial Sequence
  Description of Artificial Sequence: Synthetic oligonucleotide
agugcgacagguucgcuaca

SEQ ID NO: 133 - RNA, 20 nt, Artificial Sequence
  Description of Artificial Sequence: Synthetic oligonucleotide
uggaauagcagagacuccgg

SEQ ID NO: 134 - RNA, 20 nt, Artificial Sequence
  Description of Artificial Sequence: Synthetic oligonucleotide
cuaaauaacugugaacucgg

SEQ ID NO: 135 - RNA, 20 nt, Artificial Sequence
  Description of Artificial Sequence: Synthetic oligonucleotide
ugcuauuccaguuuccaugg

SEQ ID NO: 136 - RNA, 20 nt, Artificial Sequence
  Description of Artificial Sequence: Synthetic oligonucleotide
cagacccaggcacgacagua

SEQ ID NO: 137 - RNA, 20 nt, Artificial Sequence
  Description of Artificial Sequence: Synthetic oligonucleotide
uuucugaaacaggaucgugu

SEQ ID NO: 138 - RNA, 20 nt, Artificial Sequence
  Description of Artificial Sequence: Synthetic oligonucleotide
ugagaagucauccggucaug

SEQ ID NO: 139 - RNA, 20 nt, Artificial Sequence
  Description of Artificial Sequence: Synthetic oligonucleotide
gaauugcagaccaguuuuug

SEQ ID NO: 140 - RNA, 20 nt, Artificial Sequence
  Description of Artificial Sequence: Synthetic oligonucleotide
cgaguugccacauuucgcaa

SEQ ID NO: 141 - RNA, 20 nt, Artificial Sequence
  Description of Artificial Sequence: Synthetic oligonucleotide
cugaaacaggaucguguggg

SEQ ID NO: 142 - RNA, 20 nt, Artificial Sequence
  Description of Artificial Sequence: Synthetic oligonucleotide
ggcggcccgagauguuaucu

SEQ ID NO: 143 - RNA, 20 nt, Artificial Sequence
  Description of Artificial Sequence: Synthetic oligonucleotide
uguauaccacaccuugcaua

SEQ ID NO: 144 - RNA, 20 nt, Artificial Sequence
  Description of Artificial Sequence: Synthetic oligonucleotide
auguauaccacaccuugcau

SEQ ID NO: 145 - RNA, 20 nt, Artificial Sequence
  Description of Artificial Sequence: Synthetic oligonucleotide
ucuuagugaaaagcaaacac

SEQ ID NO: 146 - RNA, 20 nt, Artificial Sequence
  Description of Artificial Sequence: Synthetic oligonucleotide
gggauuuggcaaccuuaaca

SEQ ID NO: 147 - RNA, 20 nt, Artificial Sequence
  Description of Artificial Sequence: Synthetic oligonucleotide
uugugccaccucucccugag

SEQ ID NO: 148 - RNA, 20 nt, Artificial Sequence
  Description of Artificial Sequence: Synthetic oligonucleotide
accaagaccuguuaccacca

SEQ ID NO: 149 - RNA, 20 nt, Artificial Sequence
  Description of Artificial Sequence: Synthetic oligonucleotide
ucggcaguaauaucucuggg

SEQ ID NO: 150 - RNA, 20 nt, Artificial Sequence
  Description of Artificial Sequence: Synthetic oligonucleotide
ggaucugaccgcccuaugca

SEQ ID NO: 151 - RNA, 20 nt, Artificial Sequence
  Description of Artificial Sequence: Synthetic oligonucleotide
cgucauggucuuaucaacuu

SEQ ID NO: 152 - RNA, 20 nt, Artificial Sequence
  Description of Artificial Sequence: Synthetic oligonucleotide
uucaagacgacaguucugga

SEQ ID NO: 153 - RNA, 20 nt, Artificial Sequence
  Description of Artificial Sequence: Synthetic oligonucleotide
ugaagucuaguugaugacua

SEQ ID NO: 154 - RNA, 20 nt, Artificial Sequence
  Description of Artificial Sequence: Synthetic oligonucleotide
cacaguuauuuagagcguca

SEQ ID NO: 155 - RNA, 20 nt, Artificial Sequence
  Description of Artificial Sequence: Synthetic oligonucleotide
ugccaacaguauuggagcug

SEQ ID NO: 156 - RNA, 20 nt, Artificial Sequence
  Description of Artificial Sequence: Synthetic oligonucleotide
agugccaacaguauuggagc

SEQ ID NO: 157 - RNA, 20 nt, Artificial Sequence
  Description of Artificial Sequence: Synthetic oligonucleotide
gcaucugucucacaugcuug

SEQ ID NO: 158 - RNA, 20 nt, Artificial Sequence
  Description of Artificial Sequence: Synthetic oligonucleotide
acaucugcaguccaaaggau

SEQ ID NO: 159 - RNA, 20 nt, Artificial Sequence
  Description of Artificial Sequence: Synthetic oligonucleotide
ggcacaaacugaacggcugg

SEQ ID NO: 160 - RNA, 20 nt, Artificial Sequence
  Description of Artificial Sequence: Synthetic oligonucleotide
gguaauuauuauaggcucug

SEQ ID NO: 161 - RNA, 20 nt, Artificial Sequence
  Description of Artificial Sequence: Synthetic oligonucleotide
aagaugagcagauugaacau

SEQ ID NO: 162 - RNA, 20 nt, Artificial Sequence
  Description of Artificial Sequence: Synthetic oligonucleotide
uggcaguacgacugccagca

SEQ ID NO: 163 - RNA, 20 nt, Artificial Sequence
  Description of Artificial Sequence: Synthetic oligonucleotide
cgcggaggcucuuucuugcg

SEQ ID NO: 164 - RNA, 20 nt, Artificial Sequence
  Description of Artificial Sequence: Synthetic oligonucleotide
auaagugacgaugugauugu

SEQ ID NO: 165 - RNA, 20 nt, Artificial Sequence
  Description of Artificial Sequence: Synthetic oligonucleotide
ggcaguacgacugccagcag

SEQ ID NO: 166 - RNA, 20 nt, Artificial Sequence
  Description of Artificial Sequence: Synthetic oligonucleotide
ggaaaacaucugcaguccaa

SEQ ID NO: 167 - RNA, 20 nt, Artificial Sequence
  Description of Artificial Sequence: Synthetic oligonucleotide
ugcccgaacaaauugacacu

SEQ ID NO: 168 - RNA, 20 nt, Artificial Sequence
  Description of Artificial Sequence: Synthetic oligonucleotide
acugaauacagcagugcgac

SEQ ID NO: 169 - RNA, 20 nt, Artificial Sequence
  Description of Artificial Sequence: Synthetic oligonucleotide
cuggcagccaccugacagua

SEQ ID NO: 170 - RNA, 20 nt, Artificial Sequence
  Description of Artificial Sequence: Synthetic oligonucleotide
gcagacccaggcacgacagu

SEQ ID NO: 171 - RNA, 20 nt, Artificial Sequence
  Description of Artificial Sequence: Synthetic oligonucleotide
uuugcuuuucacuaagaacu

SEQ ID NO: 172 - RNA, 20 nt, Artificial Sequence
  Description of Artificial Sequence: Synthetic oligonucleotide
gggacacaggcuuauuauug

SEQ ID NO: 173 - RNA, 20 nt, Artificial Sequence
  Description of Artificial Sequence: Synthetic oligonucleotide
uggcuacucgugugugccug

SEQ ID NO: 174 - RNA, 20 nt, Artificial Sequence
  Description of Artificial Sequence: Synthetic oligonucleotide
ucucccgcaaagaagagucg

SEQ ID NO: 175 - RNA, 20 nt, Artificial Sequence
  Description of Artificial Sequence: Synthetic oligonucleotide
aacaucugcaguccaaagga

SEQ ID NO: 176 - RNA, 20 nt, Artificial Sequence
  Description of Artificial Sequence: Synthetic oligonucleotide
cuuagugaaaagcaaacaca

SEQ ID NO: 177 - RNA, 20 nt, Artificial Sequence
  Description of Artificial Sequence: Synthetic oligonucleotide
cccaggcacgacaguagggc

SEQ ID NO: 178 - RNA, 20 nt, Artificial Sequence
  Description of Artificial Sequence: Synthetic oligonucleotide
gucaauuuguucgggcaugu

SEQ ID NO: 179 - RNA, 20 nt, Artificial Sequence
  Description of Artificial Sequence: Synthetic oligonucleotide
gaauaagagccccgagccca

SEQ ID NO: 180 - RNA, 20 nt, Artificial Sequence
  Description of Artificial Sequence: Synthetic oligonucleotide
cugcuauuccaguuuccaug

SEQ ID NO: 181 - RNA, 20 nt, Artificial Sequence
  Description of Artificial Sequence: Synthetic oligonucleotide
gagagguggcacaaacugaa

SEQ ID NO: 182 - RNA, 20 nt, Artificial Sequence
  Description of Artificial Sequence: Synthetic oligonucleotide
aagugagccugaagaaccau

SEQ ID NO: 183 - RNA, 20 nt, Artificial Sequence
  Description of Artificial Sequence: Synthetic oligonucleotide
uuugcuuucuucguuaggug

SEQ ID NO: 184 - RNA, 20 nt, Artificial Sequence
  Description of Artificial Sequence: Synthetic oligonucleotide
auuucugaaacaggaucgug

SEQ ID NO: 185 - RNA, 20 nt, Artificial Sequence
  Description of Artificial Sequence: Synthetic oligonucleotide
acgacaguagggccggccug

SEQ ID NO: 186 - RNA, 20 nt, Artificial Sequence
  Description of Artificial Sequence: Synthetic oligonucleotide
guccguuggcuucauaaagu

SEQ ID NO: 187 - RNA, 20 nt, Artificial Sequence
  Description of Artificial Sequence: Synthetic oligonucleotide
auaccacaccuugcauaggg

SEQ ID NO: 188 - RNA, 20 nt, Artificial Sequence
  Description of Artificial Sequence: Synthetic oligonucleotide
gcucuaaauaacugugaacu

SEQ ID NO: 189 - RNA, 20 nt, Artificial Sequence
  Description of Artificial Sequence: Synthetic oligonucleotide
aggagggaauccuauggcug

SEQ ID NO: 190 - RNA, 20 nt, Artificial Sequence
  Description of Artificial Sequence: Synthetic oligonucleotide
auaaauaaagguuugacucg

SEQ ID NO: 191 - RNA, 20 nt, Artificial Sequence
  Description of Artificial Sequence: Synthetic oligonucleotide
agcugaucuuggagccaugg

SEQ ID NO: 192 - RNA, 20 nt, Artificial Sequence
  Description of Artificial Sequence: Synthetic oligonucleotide
uaaagguuugacucguggag

SEQ ID NO: 193 - RNA, 20 nt, Artificial Sequence
  Description of Artificial Sequence: Synthetic oligonucleotide
uggaccacaacagacccaga

SEQ ID NO: 194 - RNA, 20 nt, Artificial Sequence
  Description of Artificial Sequence: Synthetic oligonucleotide
gaugaauuagcugaaacaca

SEQ ID NO: 195 - RNA, 20 nt, Artificial Sequence
  Description of Artificial Sequence: Synthetic oligonucleotide
aguagccauuccuuacuguc

SEQ ID NO: 196 - RNA, 20 nt, Artificial Sequence
  Description of Artificial Sequence: Synthetic oligonucleotide
cuggcgaggcagcguauaca

SEQ ID NO: 197 - RNA, 20 nt, Artificial Sequence
  Description of Artificial Sequence: Synthetic oligonucleotide
guuuuccacucagggagagg

SEQ ID NO: 198 - RNA, 20 nt, Artificial Sequence
  Description of Artificial Sequence: Synthetic oligonucleotide
cggaaccgccgggguccgca

SEQ ID NO: 199 - RNA, 20 nt, Artificial Sequence
  Description of Artificial Sequence: Synthetic oligonucleotide
agugagccugaagaaccauc

SEQ ID NO: 200 - RNA, 20 nt, Artificial Sequence
  Description of Artificial Sequence: Synthetic oligonucleotide
ucaacuucggcaucuauaag

SEQ ID NO: 201 - RNA, 20 nt, Artificial Sequence
  Description of Artificial Sequence: Synthetic oligonucleotide
guggggcaccuggaaucgag

SEQ ID NO: 202 - RNA, 20 nt, Artificial Sequence
  Description of Artificial Sequence: Synthetic oligonucleotide
ggaauagcagagacuccgga

SEQ ID NO: 203 - RNA, 20 nt, Artificial Sequence
  Description of Artificial Sequence: Synthetic oligonucleotide
agccaccugacaguaaggaa

SEQ ID NO: 204 - RNA, 20 nt, Artificial Sequence
  Description of Artificial Sequence: Synthetic oligonucleotide
auaguuuccuuugcgaaaug

SEQ ID NO: 205 - RNA, 20 nt, Artificial Sequence
  Description of Artificial Sequence: Synthetic oligonucleotide
aguuggaagcgaauccccca

SEQ ID NO: 206 - RNA, 20 nt, Artificial Sequence
  Description of Artificial Sequence: Synthetic oligonucleotide
auggcucagccaaucacucc

SEQ ID NO: 207 - RNA, 20 nt, Artificial Sequence
  Description of Artificial Sequence: Synthetic oligonucleotide
agcggcagcaaccgggacgg

SEQ ID NO: 208 - RNA, 20 nt, Artificial Sequence
  Description of Artificial Sequence: Synthetic oligonucleotide
cuuuuagcccaaagaaacug

SEQ ID NO: 209 - RNA, 20 nt, Artificial Sequence
  Description of Artificial Sequence: Synthetic oligonucleotide
aagauguagcuucuagcaac

SEQ ID NO: 210 - RNA, 20 nt, Artificial Sequence
  Description of Artificial Sequence: Synthetic oligonucleotide
aauaauacucaucuucugag

SEQ ID NO: 211 - RNA, 20 nt, Artificial Sequence
  Description of Artificial Sequence: Synthetic oligonucleotide
ccggcccuacugucgugccu

SEQ ID NO: 212 - RNA, 20 nt, Artificial Sequence
  Description of Artificial Sequence: Synthetic oligonucleotide
cugcuucuugagaagucauc

SEQ ID NO: 213 - RNA, 20 nt, Artificial Sequence
  Description of Artificial Sequence: Synthetic oligonucleotide
agagccgacuuccucaugac

SEQ ID NO: 214 - RNA, 20 nt, Artificial Sequence
  Description of Artificial Sequence: Synthetic oligonucleotide
aggccuucugcuaaagccac

SEQ ID NO: 215 - RNA, 20 nt, Artificial Sequence
  Description of Artificial Sequence: Synthetic oligonucleotide
gaaugacaacuuccaaugcc

SEQ ID NO: 216 - RNA, 20 nt, Artificial Sequence
  Description of Artificial Sequence: Synthetic oligonucleotide
ugguuaaaaggacacuguca

SEQ ID NO: 217 - RNA, 20 nt, Artificial Sequence
  Description of Artificial Sequence: Synthetic oligonucleotide
ugcugcuucagcacacccag

SEQ ID NO: 218 - RNA, 20 nt, Artificial Sequence
  Description of Artificial Sequence: Synthetic oligonucleotide
ccgcaagaaagagccuccgc

SEQ ID NO: 219 - RNA, 20 nt, Artificial Sequence
  Description of Artificial Sequence: Synthetic oligonucleotide
aacuuccaaugccuggccaa

SEQ ID NO: 220 - RNA, 20 nt, Artificial Sequence
  Description of Artificial Sequence: Synthetic oligonucleotide
aaagguuugacucguggagc

SEQ ID NO: 221 - RNA, 20 nt, Artificial Sequence
  Description of Artificial Sequence: Synthetic oligonucleotide
gugccaacaguauuggagcu

SEQ ID NO: 222 - RNA, 20 nt, Artificial Sequence
  Description of Artificial Sequence: Synthetic oligonucleotide
ucauccggucaugaggaagu

SEQ ID NO: 223 - RNA, 20 nt, Artificial Sequence
  Description of Artificial Sequence: Synthetic oligonucleotide
gccacuagugccaacaguau

SEQ ID NO: 224 - RNA, 20 nt, Artificial Sequence
  Description of Artificial Sequence: Synthetic oligonucleotide
uagggcaagcuaccuuguua

SEQ ID NO: 225 - RNA, 20 nt, Artificial Sequence
  Description of Artificial Sequence: Synthetic oligonucleotide
gaugccuggccauucucaaa

SEQ ID NO: 226 - RNA, 20 nt, Artificial Sequence
  Description of Artificial Sequence: Synthetic oligonucleotide
caacucucucccuuaagcac

SEQ ID NO: 227 - RNA, 20 nt, Artificial Sequence
  Description of Artificial Sequence: Synthetic oligonucleotide
uguuuuccagauauuaucag

SEQ ID NO: 228 - RNA, 20 nt, Artificial Sequence
  Description of Artificial Sequence: Synthetic oligonucleotide
cuucaagacgacaguucugg

SEQ ID NO: 229 - RNA, 20 nt, Artificial Sequence
  Description of Artificial Sequence: Synthetic oligonucleotide
gauuccacgacucuucuuug

SEQ ID NO: 230 - RNA, 20 nt, Artificial Sequence
  Description of Artificial Sequence: Synthetic oligonucleotide
augcaucugucucacaugcu

SEQ ID NO: 231 - RNA, 20 nt, Artificial Sequence
  Description of Artificial Sequence: Synthetic oligonucleotide
aacucucucccuuaagcacu

SEQ ID NO: 232 - RNA, 20 nt, Artificial Sequence
  Description of Artificial Sequence: Synthetic oligonucleotide
ucgacuuacagcuuguccgu

SEQ ID NO: 233 - RNA, 20 nt, Artificial Sequence
  Description of Artificial Sequence: Synthetic oligonucleotide
ugguagcagugcaguaccuc

SEQ ID NO: 234 - RNA, 20 nt, Artificial Sequence
  Description of Artificial Sequence: Synthetic oligonucleotide
aggagguccuuacuugguag

SEQ ID NO: 235 - RNA, 20 nt, Artificial Sequence
  Description of Artificial Sequence: Synthetic oligonucleotide
auagguagaguacagagaga

SEQ ID NO: 236 - RNA, 20 nt, Artificial Sequence
  Description of Artificial Sequence: Synthetic oligonucleotide
gcacuguggcuggguaguua

SEQ ID NO: 237 - RNA, 20 nt, Artificial Sequence
  Description of Artificial Sequence: Synthetic oligonucleotide
uuuucuaggagggaauccua

SEQ ID NO: 238 - RNA, 20 nt, Artificial Sequence
  Description of Artificial Sequence: Synthetic oligonucleotide
cggaccccggcgguuccgcc

SEQ ID NO: 239 - RNA, 20 nt, Artificial Sequence
  Description of Artificial Sequence: Synthetic oligonucleotide
ugcccacuuuaugaagccaa

SEQ ID NO: 240 - RNA, 20 nt, Artificial Sequence
  Description of Artificial Sequence: Synthetic oligonucleotide
gagcaccaugcacuguggcu

SEQ ID NO: 241 - RNA, 20 nt, Artificial Sequence
  Description of Artificial Sequence: Synthetic oligonucleotide
gcaaagaagagucguggaau

SEQ ID NO: 242 - RNA, 20 nt, Artificial Sequence
  Description of Artificial Sequence: Synthetic oligonucleotide
cucccuuaagcacugggauc

SEQ ID NO: 243 - RNA, 20 nt, Artificial Sequence
  Description of Artificial Sequence: Synthetic oligonucleotide
agaugauccugcagcaacau

SEQ ID NO: 244 - RNA, 20 nt, Artificial Sequence
  Description of Artificial Sequence: Synthetic oligonucleotide
cccgcggaggcucuuucuug

SEQ ID NO: 245 - RNA, 20 nt, Artificial Sequence
  Description of Artificial Sequence: Synthetic oligonucleotide
ucugcuauuccaguuuccau

SEQ ID NO: 246 - RNA, 20 nt, Artificial Sequence
  Description of Artificial Sequence: Synthetic oligonucleotide
ugugguccacugauaauauc

SEQ ID NO: 247 - RNA, 20 nt, Artificial Sequence
  Description of Artificial Sequence: Synthetic oligonucleotide
aauugcagaccaguuuuugg

SEQ ID NO: 248 - RNA, 20 nt, Artificial Sequence
  Description of Artificial Sequence: Synthetic oligonucleotide
uuuagcuaaaaagacaggaa

SEQ ID NO: 249 - RNA, 20 nt, Artificial Sequence
  Description of Artificial Sequence: Synthetic oligonucleotide
acagcaggcggcuccgagaa

SEQ ID NO: 250 - RNA, 20 nt, Artificial Sequence
  Description of Artificial Sequence: Synthetic oligonucleotide
augucacacuuuuggaagcc

SEQ ID NO: 251 - RNA, 20 nt, Artificial Sequence
  Description of Artificial Sequence: Synthetic oligonucleotide
uucuucccagauaacaucuc

SEQ ID NO: 252 - RNA, 20 nt, Artificial Sequence
  Description of Artificial Sequence: Synthetic oligonucleotide
ucguuggcgugcugaucccu

SEQ ID NO: 253 - RNA, 20 nt, Artificial Sequence
  Description of Artificial Sequence: Synthetic oligonucleotide
gcugagugggcugcgagaag

SEQ ID NO: 254 - RNA, 20 nt, Artificial Sequence
  Description of Artificial Sequence: Synthetic oligonucleotide
ucggaccagccggcgcaagc

SEQ ID NO: 255 - RNA, 20 nt, Artificial Sequence
  Description of Artificial Sequence: Synthetic oligonucleotide
cauguauacgcugccucgcc

SEQ ID NO: 256 - RNA, 20 nt, Artificial Sequence
  Description of Artificial Sequence: Synthetic oligonucleotide
gguuccgccaggcccccggg

SEQ ID NO: 257 - RNA, 20 nt, Artificial Sequence
  Description of Artificial Sequence: Synthetic oligonucleotide
ugugauuguuggccgaugcc

SEQ ID NO: 258 - RNA, 20 nt, Artificial Sequence
  Description of Artificial Sequence: Synthetic oligonucleotide
agccauuccuuacugucagg

SEQ ID NO: 259 - RNA, 20 nt, Artificial Sequence
  Description of Artificial Sequence: Synthetic oligonucleotide
aauaauaagccugugucccu

SEQ ID NO: 260 - RNA, 20 nt, Artificial Sequence
  Description of Artificial Sequence: Synthetic oligonucleotide
uccaauacuguuggcacuag

SEQ ID NO: 261 - RNA, 20 nt, Artificial Sequence
  Description of Artificial Sequence: Synthetic oligonucleotide
uccaugggggucgcagaccc

SEQ ID NO: 262 - RNA, 20 nt, Artificial Sequence
  Description of Artificial Sequence: Synthetic oligonucleotide
gguggcacaaacugaacggc

SEQ ID NO: 263 - RNA, 20 nt, Artificial Sequence
  Description of Artificial Sequence: Synthetic oligonucleotide
aaaucccuuugagaauggcc

SEQ ID NO: 264 - RNA, 20 nt, Artificial Sequence
  Description of Artificial Sequence: Synthetic oligonucleotide
uguagcugaucuuggagcca

SEQ ID NO: 265 - RNA, 20 nt, Artificial Sequence
  Description of Artificial Sequence: Synthetic oligonucleotide
ucuuauuccuauguugcugc

SEQ ID NO: 266 - RNA, 20 nt, Artificial Sequence
  Description of Artificial Sequence: Synthetic oligonucleotide
aacuggaauagcagagacuc

SEQ ID NO: 267 - RNA, 20 nt, Artificial Sequence
  Description of Artificial Sequence: Synthetic oligonucleotide
ugcagcggcagcaaccggga

SEQ ID NO: 268 - RNA, 20 nt, Artificial Sequence
  Description of Artificial Sequence: Synthetic oligonucleotide
uauacauggcccccaaaaac

SEQ ID NO: 269 - RNA, 20 nt, Artificial Sequence
  Description of Artificial Sequence: Synthetic oligonucleotide
aaugccuggccaagggacac

SEQ ID NO: 270 - RNA, 20 nt, Artificial Sequence
  Description of Artificial Sequence: Synthetic oligonucleotide
aagaaacuguggugucucgu

SEQ ID NO: 271 - RNA, 20 nt, Artificial Sequence
  Description of Artificial Sequence: Synthetic oligonucleotide
ugaggcccugcggaccccgg

SEQ ID NO: 272 - RNA, 20 nt, Artificial Sequence
  Description of Artificial Sequence: Synthetic oligonucleotide
uuuaaaugcagcugcaguug

SEQ ID NO: 273 - RNA, 20 nt, Artificial Sequence
  Description of Artificial Sequence: Synthetic oligonucleotide
guguuuugaucggguguucu

SEQ ID NO: 274 - RNA, 20 nt, Artificial Sequence
  Description of Artificial Sequence: Synthetic oligonucleotide
gaugaugacuuugaguucac

SEQ ID NO: 275 - RNA, 20 nt, Artificial Sequence
  Description of Artificial Sequence: Synthetic oligonucleotide
agguaauuauuauaggcucu

SEQ ID NO: 276 - RNA, 20 nt, Artificial Sequence
  Description of Artificial Sequence: Synthetic oligonucleotide
ggacuucaagacgacaguuc

SEQ ID NO: 277 - RNA, 20 nt, Artificial Sequence
  Description of Artificial Sequence: Synthetic oligonucleotide
ggggccuggcggaaccgccg

SEQ ID NO: 278 - RNA, 20 nt, Artificial Sequence
  Description of Artificial Sequence: Synthetic oligonucleotide
gauguuuuccacucagggag

SEQ ID NO: 279 - RNA, 20 nt, Artificial Sequence
  Description of Artificial Sequence: Synthetic oligonucleotide
auccaagugucaauuuguuc

SEQ ID NO: 280 - RNA, 20 nt, Artificial Sequence
  Description of Artificial Sequence: Synthetic oligonucleotide
aaugcagcugcaguuguggu

SEQ ID NO: 281 - RNA, 20 nt, Artificial Sequence
  Description of Artificial Sequence: Synthetic oligonucleotide
cagcagagcaccaugcacug

SEQ ID NO: 282 - RNA, 20 nt, Artificial Sequence
  Description of Artificial Sequence: Synthetic oligonucleotide
ccuuccacagggcaagcagg

SEQ ID NO: 283 - RNA, 20 nt, Artificial Sequence
  Description of Artificial Sequence: Synthetic oligonucleotide
cugagugggcugcgagaagc

SEQ ID NO: 284 - RNA, 20 nt, Artificial Sequence
  Description of Artificial Sequence: Synthetic oligonucleotide
cuuuauagagguuccagaag

SEQ ID NO: 285 - RNA, 20 nt, Artificial Sequence
  Description of Artificial Sequence: Synthetic oligonucleotide
aacucggcaguaauaucucu

SEQ ID NO: 286 - RNA, 20 nt, Artificial Sequence
  Description of Artificial Sequence: Synthetic oligonucleotide
acaguuacaaaguuuuggaa

SEQ ID NO: 287 - RNA, 20 nt, Artificial Sequence
  Description of Artificial Sequence: Synthetic oligonucleotide
caacuuccaaugccuggcca

SEQ ID NO: 288 - RNA, 20 nt, Artificial Sequence
  Description of Artificial Sequence: Synthetic oligonucleotide
acugcagauguuuuccacuc

SEQ ID NO: 289 - RNA, 20 nt, Artificial Sequence
  Description of Artificial Sequence: Synthetic oligonucleotide
aacuacccagccacagugca

SEQ ID NO: 290 - RNA, 20 nt, Artificial Sequence
  Description of Artificial Sequence: Synthetic oligonucleotide
cuccgagaacgggucugagg

SEQ ID NO: 291 - RNA, 20 nt, Artificial Sequence
  Description of Artificial Sequence: Synthetic oligonucleotide
aaaaccuucugggucuguug

SEQ ID NO: 292 - RNA, 20 nt, Artificial Sequence
  Description of Artificial Sequence: Synthetic oligonucleotide
uauaaggugcuucuaauugu

SEQ ID NO: 293 - RNA, 20 nt, Artificial Sequence
  Description of Artificial Sequence: Synthetic oligonucleotide
ugggcauuuuugcuugaucu

SEQ ID NO: 294 - RNA, 20 nt, Artificial Sequence
  Description of Artificial Sequence: Synthetic oligonucleotide
uuccccagcuccaauacugu

SEQ ID NO: 295 - RNA, 20 nt, Artificial Sequence
  Description of Artificial Sequence: Synthetic oligonucleotide
cagcaggcggcuccgagaac

SEQ ID NO: 296 - RNA, 20 nt, Artificial Sequence
  Description of Artificial Sequence: Synthetic oligonucleotide
gguugccaaaucccauccuu

SEQ ID NO: 297 - RNA, 20 nt, Artificial Sequence
  Description of Artificial Sequence: Synthetic oligonucleotide
gacgacaguucuggagggua

SEQ ID NO: 298 - RNA, 20 nt, Artificial Sequence
  Description of Artificial Sequence: Synthetic oligonucleotide
auacuguuggcacuaguggc

SEQ ID NO: 299 - RNA, 20 nt, Artificial Sequence
  Description of Artificial Sequence: Synthetic oligonucleotide
cuucagcacacccaggggaa

SEQ ID NO: 300 - RNA, 20 nt, Artificial Sequence
  Description of Artificial Sequence: Synthetic oligonucleotide
ugguagagcaagaguuuaac

SEQ ID NO: 301 - RNA, 20 nt, Artificial Sequence
  Description of Artificial Sequence: Synthetic oligonucleotide
cccgcaagaaagagccuccg

SEQ ID NO: 302 - RNA, 20 nt, Artificial Sequence
  Description of Artificial Sequence: Synthetic oligonucleotide
uguggggcaccuggaaucga

SEQ ID NO: 303 - RNA, 20 nt, Artificial Sequence
  Description of Artificial Sequence: Synthetic oligonucleotide
cggcuccgagaacgggucug

SEQ ID NO: 304 - RNA, 20 nt, Artificial Sequence
  Description of Artificial Sequence: Synthetic oligonucleotide
gugccuguggcuuuagcaga

SEQ ID NO: 305 - RNA, 20 nt, Artificial Sequence
  Description of Artificial Sequence: Synthetic oligonucleotide
uugccagcuucucaccugug

SEQ ID NO: 306 - RNA, 20 nt, Artificial Sequence
  Description of Artificial Sequence: Synthetic oligonucleotide
guuuguuuuccuuaccuugg

SEQ ID NO: 307 - RNA, 20 nt, Artificial Sequence
  Description of Artificial Sequence: Synthetic oligonucleotide
cagguucgcuacacggcuuc

SEQ ID NO: 308 - RNA, 20 nt, Artificial Sequence
  Description of Artificial Sequence: Synthetic oligonucleotide
aacucacccgaugguucuuc

SEQ ID NO: 309 - RNA, 20 nt, Artificial Sequence
  Description of Artificial Sequence: Synthetic oligonucleotide
gcuuucuucguuaggugugg

SEQ ID NO: 310 - RNA, 20 nt, Artificial Sequence
  Description of Artificial Sequence: Synthetic oligonucleotide
caaacaaguaaauauggaac

SEQ ID NO: 311 - RNA, 20 nt, Artificial Sequence
  Description of Artificial Sequence: Synthetic oligonucleotide
acccccucaagccccaccug

SEQ ID NO: 312 - RNA, 20 nt, Artificial Sequence
  Description of Artificial Sequence: Synthetic oligonucleotide
gcagcaaccgggacggaggc

SEQ ID NO: 313 - RNA, 20 nt, Artificial Sequence
  Description of Artificial Sequence: Synthetic oligonucleotide
aggagaagcugcugguauca

SEQ ID NO: 314 - RNA, 20 nt, Artificial Sequence
  Description of Artificial Sequence: Synthetic oligonucleotide
uguuugcugaccacagccau

SEQ ID NO: 315 - RNA, 20 nt, Artificial Sequence
  Description of Artificial Sequence: Synthetic oligonucleotide
aaagauucagcugacauuug

SEQ ID NO: 316 - RNA, 20 nt, Artificial Sequence
  Description of Artificial Sequence: Synthetic oligonucleotide
uguccguuggcuucauaaag

SEQ ID NO: 317 - RNA, 20 nt, Artificial Sequence
  Description of Artificial Sequence: Synthetic oligonucleotide
cuuggagccauggugguaac

SEQ ID NO: 318 - RNA, 20 nt, Artificial Sequence
  Description of Artificial Sequence: Synthetic oligonucleotide
aguucuggaggguauggaga

SEQ ID NO: 319 - RNA, 20 nt, Artificial Sequence
  Description of Artificial Sequence: Synthetic oligonucleotide
ccgcgggccucgccccccgg

SEQ ID NO: 320 - RNA, 20 nt, Artificial Sequence
  Description of Artificial Sequence: Synthetic oligonucleotide
cggcggcccgagauguuauc

SEQ ID NO: 321 - RNA, 20 nt, Artificial Sequence
  Description of Artificial Sequence: Synthetic oligonucleotide
uugcuuuuagcuaaaaagac

SEQ ID NO: 322 - RNA, 20 nt, Artificial Sequence
  Description of Artificial Sequence: Synthetic oligonucleotide
gaauagcagagacuccggag

SEQ ID NO: 323 - RNA, 20 nt, Artificial Sequence
  Description of Artificial Sequence: Synthetic oligonucleotide
uuaccugaucccagugcuua

SEQ ID NO: 324 - RNA, 20 nt, Artificial Sequence
  Description of Artificial Sequence: Synthetic oligonucleotide
cuguggggcaccuggaaucg

SEQ ID NO: 325 - RNA, 20 nt, Artificial Sequence
  Description of Artificial Sequence: Synthetic oligonucleotide
cugucgggcccagccgaggu

SEQ ID NO: 326 - RNA, 20 nt, Artificial Sequence
  Description of Artificial Sequence: Synthetic oligonucleotide
agggccggccugaggcccug

SEQ ID NO: 327 - RNA, 20 nt, Artificial Sequence
  Description of Artificial Sequence: Synthetic oligonucleotide
cugcagauguuuuccacuca

SEQ ID NO: 328 - RNA, 20 nt, Artificial Sequence
  Description of Artificial Sequence: Synthetic oligonucleotide
gauguuaucugggaagaagg

SEQ ID NO: 329 - RNA, 20 nt, Artificial Sequence
  Description of Artificial Sequence: Synthetic oligonucleotide
cucugcuauuccaguuucca

SEQ ID NO: 330 - RNA, 20 nt, Artificial Sequence
  Description of Artificial Sequence: Synthetic oligonucleotide
gaaggcauuuaccuuuauag

SEQ ID NO: 331 - RNA, 20 nt, Artificial Sequence
  Description of Artificial Sequence: Synthetic oligonucleotide
gaagaagauagugaaaacuc

SEQ ID NO: 332 - RNA, 20 nt, Artificial Sequence
  Description of Artificial Sequence: Synthetic oligonucleotide
gccggcccuacugucgugcc

SEQ ID NO: 333 - RNA, 20 nt, Artificial Sequence
  Description of Artificial Sequence: Synthetic oligonucleotide
ggugguguuguguuuugauc

SEQ ID NO: 334 - RNA, 20 nt, Artificial Sequence
  Description of Artificial Sequence: Synthetic oligonucleotide
gccugggucugcgaccccca

SEQ ID NO: 335 - RNA, 20 nt, Artificial Sequence
  Description of Artificial Sequence: Synthetic oligonucleotide
cuguauucaguuuaaugucu

SEQ ID NO: 336 - RNA, 20 nt, Artificial Sequence
  Description of Artificial Sequence: Synthetic oligonucleotide
gaacucggcaguaauaucuc

SEQ ID NO: 337 - RNA, 20 nt, Artificial Sequence
  Description of Artificial Sequence: Synthetic oligonucleotide
cuuucuucguuaggugugga

SEQ ID NO: 338 - RNA, 20 nt, Artificial Sequence
  Description of Artificial Sequence: Synthetic oligonucleotide
cuaguggcaggagaagcugc

SEQ ID NO: 339 - RNA, 20 nt, Artificial Sequence
  Description of Artificial Sequence: Synthetic oligonucleotide
caggaacaccugguguggcc

SEQ ID NO: 340 - RNA, 20 nt, Artificial Sequence
  Description of Artificial Sequence: Synthetic oligonucleotide
ugcgucgcauuuauaaauaa

SEQ ID NO: 341 - RNA, 20 nt, Artificial Sequence
  Description of Artificial Sequence: Synthetic oligonucleotide
cgagauguuaucugggaaga

SEQ ID NO: 342 - RNA, 20 nt, Artificial Sequence
  Description of Artificial Sequence: Synthetic oligonucleotide
gcucgacaguuacaaaguuu

SEQ ID NO: 343 - RNA, 20 nt, Artificial Sequence
  Description of Artificial Sequence: Synthetic oligonucleotide
cgaugccuggccauucucaa

SEQ ID NO: 344 - RNA, 20 nt, Artificial Sequence
  Description of Artificial Sequence: Synthetic oligonucleotide
aaguccuccugcuugcccug

SEQ ID NO: 345 - RNA, 20 nt, Artificial Sequence
  Description of Artificial Sequence: Synthetic oligonucleotide
ggccaccucagacccguucu

SEQ ID NO: 346 - RNA, 20 nt, Artificial Sequence
  Description of Artificial Sequence: Synthetic oligonucleotide
auugaaagaacuucuuaaua

SEQ ID NO: 347 - RNA, 20 nt, Artificial Sequence
  Description of Artificial Sequence: Synthetic oligonucleotide
gccauggugguaacaggucu

SEQ ID NO: 348 - RNA, 20 nt, Artificial Sequence
  Description of Artificial Sequence: Synthetic oligonucleotide
uaggagguccuuacuuggua

SEQ ID NO: 349 - RNA, 20 nt, Artificial Sequence
  Description of Artificial Sequence: Synthetic oligonucleotide
ggaaacuauguagcugaucu

SEQ ID NO: 350 - RNA, 20 nt, Artificial Sequence
  Description of Artificial Sequence: Synthetic oligonucleotide
uuccucagguggggcuugag

SEQ ID NO: 351 - RNA, 20 nt, Artificial Sequence
  Description of Artificial Sequence: Synthetic oligonucleotide
cucgauuccaggugccccac

SEQ ID NO: 352 - RNA, 20 nt, Artificial Sequence
  Description of Artificial Sequence: Synthetic oligonucleotide
accaaaaaucccuuugagaa

SEQ ID NO: 353 - RNA, 20 nt, Artificial Sequence
  Description of Artificial Sequence: Synthetic oligonucleotide
gggccugucgggcccagccg

SEQ ID NO: 354 - RNA, 20 nt, Artificial Sequence
  Description of Artificial Sequence: Synthetic oligonucleotide
cgguuccgccaggcccccgg

SEQ ID NO: 355 - RNA, 20 nt, Artificial Sequence
  Description of Artificial Sequence: Synthetic oligonucleotide
aagguaauuauuauaggcuc

SEQ ID NO: 356 - RNA, 20 nt, Artificial Sequence
  Description of Artificial Sequence: Synthetic oligonucleotide
guucucuguacccuuccccu

SEQ ID NO: 357 - RNA, 20 nt, Artificial Sequence
  Description of Artificial Sequence: Synthetic oligonucleotide
auacucaucuucugagaggu

SEQ ID NO: 358 - RNA, 20 nt, Artificial Sequence
  Description of Artificial Sequence: Synthetic oligonucleotide
cgagacaccacaguuucuuu

SEQ ID NO: 359 - RNA, 20 nt, Artificial Sequence
  Description of Artificial Sequence: Synthetic oligonucleotide
ggucagcaaacaaguaaaua

SEQ ID NO: 360 - RNA, 20 nt, Artificial Sequence
  Description of Artificial Sequence: Synthetic oligonucleotide
agaauugcagaccaguuuuu

SEQ ID NO: 361 - RNA, 20 nt, Artificial Sequence
  Description of Artificial Sequence: Synthetic oligonucleotide
uguguuuugaucggguguuc

SEQ ID NO: 362 - RNA, 20 nt, Artificial Sequence
  Description of Artificial Sequence: Synthetic oligonucleotide
gcuucagcacacccagggga

SEQ ID NO: 363 - RNA, 20 nt, Artificial Sequence
  Description of Artificial Sequence: Synthetic oligonucleotide
guaggagguccuuacuuggu

SEQ ID NO: 364 - RNA, 20 nt, Artificial Sequence
  Description of Artificial Sequence: Synthetic oligonucleotide
uuggcaguacgacugccagc

SEQ ID NO: 365 - RNA, 20 nt, Artificial Sequence
  Description of Artificial Sequence: Synthetic oligonucleotide
ggagagaguugagagaggug

SEQ ID NO: 366 - RNA, 20 nt, Artificial Sequence
  Description of Artificial Sequence: Synthetic oligonucleotide
gucggaccagccggcgcaag

SEQ ID NO: 367 - RNA, 20 nt, Artificial Sequence
  Description of Artificial Sequence: Synthetic oligonucleotide
agaagaaaaacuucaggagu

SEQ ID NO: 368 - RNA, 20 nt, Artificial Sequence
  Description of Artificial Sequence: Synthetic oligonucleotide
gcuggcccugggacagcagg

SEQ ID NO: 369 - RNA, 20 nt, Artificial Sequence
  Description of Artificial Sequence: Synthetic oligonucleotide
cagagagauggaugaaagcu

SEQ ID NO: 370 - RNA, 20 nt, Artificial Sequence
  Description of Artificial Sequence: Synthetic oligonucleotide
uuaagggagagaguugagag

SEQ ID NO: 371 - RNA, 20 nt, Artificial Sequence
  Description of Artificial Sequence: Synthetic oligonucleotide
gggggccuggcggaaccgcc

SEQ ID NO: 372 - RNA, 20 nt, Artificial Sequence
  Description of Artificial Sequence: Synthetic oligonucleotide
uaccugaucccagugcuuaa

SEQ ID NO: 373 - RNA, 20 nt, Artificial Sequence
  Description of Artificial Sequence: Synthetic oligonucleotide
ugggaagaaggcggcagccg

SEQ ID NO: 374 - RNA, 20 nt, Artificial Sequence
  Description of Artificial Sequence: Synthetic oligonucleotide
gcugggcccgacaggcccgc

SEQ ID NO: 375 - RNA, 20 nt, Artificial Sequence
  Description of Artificial Sequence: Synthetic oligonucleotide
cucuucuggaaccucuauaa

SEQ ID NO: 376 - RNA, 20 nt, Artificial Sequence
  Description of Artificial Sequence: Synthetic oligonucleotide
acugauaauaucuggaaaac

SEQ ID NO: 377 - RNA, 20 nt, Artificial Sequence
  Description of Artificial Sequence: Synthetic oligonucleotide
cggaggggcgucggaccagc

SEQ ID NO: 378 - RNA, 20 nt, Artificial Sequence
  Description of Artificial Sequence: Synthetic oligonucleotide
ugucacacuuuuggaagcca

SEQ ID NO: 379 - RNA, 20 nt, Artificial Sequence
  Description of Artificial Sequence: Synthetic oligonucleotide
gcgcagcccgcgggccuguc

SEQ ID NO: 380 - RNA, 20 nt, Artificial Sequence
  Description of Artificial Sequence: Synthetic oligonucleotide
auuccacgacucuucuuugc

SEQ ID NO: 381 - RNA, 20 nt, Artificial Sequence
  Description of Artificial Sequence: Synthetic oligonucleotide
augcuucuuuguauugcuga

SEQ ID NO: 382 - RNA, 20 nt, Artificial Sequence
  Description of Artificial Sequence: Synthetic oligonucleotide
cuuugagaauggccaggcau

SEQ ID NO: 383 - RNA, 20 nt, Artificial Sequence
  Description of Artificial Sequence: Synthetic oligonucleotide
aagaauugcagaccaguuuu

SEQ ID NO: 384 - RNA, 20 nt, Artificial Sequence
  Description of Artificial Sequence: Synthetic oligonucleotide
cugccucgccaggccacacc

SEQ ID NO: 385 - RNA, 20 nt, Artificial Sequence
  Description of Artificial Sequence: Synthetic oligonucleotide
cugugcaggaacaccuggug

SEQ ID NO: 386 - RNA, 20 nt, Artificial Sequence
  Description of Artificial Sequence: Synthetic oligonucleotide
ggaauaagagccccgagccc

SEQ ID NO: 387 - RNA, 20 nt, Artificial Sequence
  Description of Artificial Sequence: Synthetic oligonucleotide
ccgggacggaggcuggcccu

SEQ ID NO: 388 - RNA, 20 nt, Artificial Sequence
  Description of Artificial Sequence: Synthetic oligonucleotide
cggagccgccugcuguccca

SEQ ID NO: 389 - RNA, 20 nt, Artificial Sequence
  Description of Artificial Sequence: Synthetic oligonucleotide
cagagacuccggaggggcgu

SEQ ID NO: 390 - RNA, 20 nt, Artificial Sequence
  Description of Artificial Sequence: Synthetic oligonucleotide
cugcugcuucagcacaccca

SEQ ID NO: 391 - RNA, 20 nt, Artificial Sequence
  Description of Artificial Sequence: Synthetic oligonucleotide
gugcauggugcucugcugag

SEQ ID NO: 392 - RNA, 20 nt, Artificial Sequence
  Description of Artificial Sequence: Synthetic oligonucleotide
acaggaaagguaauuauuau

SEQ ID NO: 393 - RNA, 20 nt, Artificial Sequence
  Description of Artificial Sequence: Synthetic oligonucleotide
uuuccuuccacagggcaagc

SEQ ID NO: 394 - RNA, 20 nt, Artificial Sequence
  Description of Artificial Sequence: Synthetic oligonucleotide
cagccggcgcaagcgggcga

SEQ ID NO: 395 - RNA, 20 nt, Artificial Sequence
  Description of Artificial Sequence: Synthetic oligonucleotide
ugcauggugcucugcugagu

SEQ ID NO: 396 - RNA, 20 nt, Artificial Sequence
  Description of Artificial Sequence: Synthetic oligonucleotide
gcugcugcuucagcacaccc

SEQ ID NO: 397 - RNA, 20 nt, Artificial Sequence
  Description of Artificial Sequence: Synthetic oligonucleotide
ugucgggcccagccgagguc

SEQ ID NO: 398 - RNA, 20 nt, Artificial Sequence
  Description of Artificial Sequence: Synthetic oligonucleotide
cgugcugaucccugggcucg

SEQ ID NO: 399 - RNA, 20 nt, Artificial Sequence
  Description of Artificial Sequence: Synthetic oligonucleotide
gcgguuccgccaggcccccg

SEQ ID NO: 400 - RNA, 20 nt, Artificial Sequence
  Description of Artificial Sequence: Synthetic oligonucleotide
acacacuacuuacuguuaua

SEQ ID NO: 401 - RNA, 20 nt, Artificial Sequence
  Description of Artificial Sequence: Synthetic oligonucleotide
uaagccugugucccuuggcc

SEQ ID NO: 402 - RNA, 20 nt, Artificial Sequence
  Description of Artificial Sequence: Synthetic oligonucleotide
gcaguccaaaggaugggauu

SEQ ID NO: 403 - RNA, 20 nt, Artificial Sequence
  Description of Artificial Sequence: Synthetic oligonucleotide
ggcccagccgaggucgggcc

SEQ ID NO: 404 - RNA, 20 nt, Artificial Sequence
  Description of Artificial Sequence: Synthetic oligonucleotide
acaccugguguggccuggcg

SEQ ID NO: 405 - RNA, 20 nt, Artificial Sequence
  Description of Artificial Sequence: Synthetic oligonucleotide
gauccaagugucaauuuguu

SEQ ID NO: 406 - RNA, 20 nt, Artificial Sequence
  Description of Artificial Sequence: Synthetic oligonucleotide
ucaaaugucagcugaaucuu

SEQ ID NO: 407 - RNA, 20 nt, Artificial Sequence
  Description of Artificial Sequence: Synthetic oligonucleotide
gggcccagccgaggucgggc

SEQ ID NO: 408 - RNA, 20 nt, Artificial Sequence
  Description of Artificial Sequence: Synthetic oligonucleotide
cgacaggcccgcgggcugcg

SEQ ID NO: 409 - RNA, 20 nt, Artificial Sequence
  Description of Artificial Sequence: Synthetic oligonucleotide
ggucaugaggaagucggcuc

SEQ ID NO: 410 - RNA, 20 nt, Artificial Sequence
  Description of Artificial Sequence: Synthetic oligonucleotide
uccgcgggccucgccccccg

SEQ ID NO: 411 - RNA, 20 nt, Artificial Sequence
  Description of Artificial Sequence: Synthetic oligonucleotide
cucguuggcgugcugauccc

SEQ ID NO: 412 - RNA, 20 nt, Artificial Sequence
  Description of Artificial Sequence: Synthetic oligonucleotide
acgagacaccacaguuucuu

SEQ ID NO: 413 - RNA, 20 nt, Artificial Sequence
  Description of Artificial Sequence: Synthetic oligonucleotide
ugugucccuuggccaggcau

SEQ ID NO: 414 - RNA, 20 nt, Artificial Sequence
  Description of Artificial Sequence: Synthetic oligonucleotide
gaggaagagcucaccccugc

SEQ ID NO: 415 - RNA, 20 nt, Artificial Sequence
  Description of Artificial Sequence: Synthetic oligonucleotide
cggcugcagcggcagcaacc

SEQ ID NO: 416 - RNA, 20 nt, Artificial Sequence
  Description of Artificial Sequence: Synthetic oligonucleotide
aguucucuguacccuucccc

SEQ ID NO: 417 - RNA, 20 nt, Artificial Sequence
  Description of Artificial Sequence: Synthetic oligonucleotide
ccgcggaggcucuuucuugc

SEQ ID NO: 418 - RNA, 20 nt, Artificial Sequence
  Description of Artificial Sequence: Synthetic oligonucleotide
gagaaaugccaaagcagaga

SEQ ID NO: 419 - RNA, 20 nt, Artificial Sequence
  Description of Artificial Sequence: Synthetic oligonucleotide
gaagaaggcggcagccgcgg

SEQ ID NO: 420 - RNA, 20 nt, Artificial Sequence
  Description of Artificial Sequence: Synthetic oligonucleotide
cccccggcccgaccucggcu

SEQ ID NO: 421 - RNA, 20 nt, Artificial Sequence
  Description of Artificial Sequence: Synthetic oligonucleotide
ggcugggcccgacaggcccg

SEQ ID NO: 422 - RNA, 20 nt, Artificial Sequence
  Description of Artificial Sequence: Synthetic oligonucleotide
ucugcgacccccauggaaac

SEQ ID NO: 423 - RNA, 20 nt, Artificial Sequence
  Description of Artificial Sequence: Synthetic oligonucleotide
gccugaggcccugcggaccc

SEQ ID NO: 424 - RNA, 20 nt, Artificial Sequence
  Description of Artificial Sequence: Synthetic oligonucleotide
aggugguguuguguuuugau

SEQ ID NO: 425 - RNA, 20 nt, Artificial Sequence
  Description of Artificial Sequence: Synthetic oligonucleotide
uucauuuucuuccucaggug

SEQ ID NO: 426 - RNA, 20 nt, Artificial Sequence
  Description of Artificial Sequence: Synthetic oligonucleotide
uuaccuucgcccgcuugcgc

SEQ ID NO: 427 - RNA, 20 nt, Artificial Sequence
  Description of Artificial Sequence: Synthetic oligonucleotide
gcccagccgaggucgggccg

SEQ ID NO: 428 - RNA, 20 nt, Artificial Sequence
  Description of Artificial Sequence: Synthetic oligonucleotide
cccagggccagccuccgucc

SEQ ID NO: 429 - RNA, 20 nt, Artificial Sequence
  Description of Artificial Sequence: Synthetic oligonucleotide
ccggggggcgaggcccgcgg

SEQ ID NO: 430 - RNA, 20 nt, Artificial Sequence
  Description of Artificial Sequence: Synthetic oligonucleotide
ucuuccucagguggggcuug

SEQ ID NO: 431 - RNA, 20 nt, Artificial Sequence
  Description of Artificial Sequence: Synthetic oligonucleotide
cgaccucggcugggcccgac

SEQ ID NO: 432 - RNA, 20 nt, Artificial Sequence
  Description of Artificial Sequence: Synthetic oligonucleotide
uauggagacggccaagcauc

SEQ ID NO: 433 - RNA, 20 nt, Artificial Sequence
  Description of Artificial Sequence: Synthetic oligonucleotide
uauguugcugcaggaucauc

SEQ ID NO: 434 - RNA, 20 nt, Artificial Sequence
  Description of Artificial Sequence: Synthetic oligonucleotide
cuucuucccagauaacaucu

SEQ ID NO: 435 - RNA, 20 nt, Artificial Sequence
  Description of Artificial Sequence: Synthetic oligonucleotide
gccauucucaaagggauuuu

SEQ ID NO: 436 - RNA, 20 nt, Artificial Sequence
  Description of Artificial Sequence: Synthetic oligonucleotide
ggcgugcugaucccugggcu

SEQ ID NO: 437 - RNA, 20 nt, Artificial Sequence
  Description of Artificial Sequence: Synthetic oligonucleotide
cucgccccccgggggccugg

SEQ ID NO: 438 - RNA, 20 nt, Artificial Sequence
  Description of Artificial Sequence: Synthetic oligonucleotide
gagacagacaaauacuugau

SEQ ID NO: 439 - RNA, 20 nt, Artificial Sequence
  Description of Artificial Sequence: Synthetic oligonucleotide
ggguccgcagggccucaggc

SEQ ID NO: 440 - RNA, 20 nt, Artificial Sequence
  Description of Artificial Sequence: Synthetic oligonucleotide
acuccuggccccucgauucc

SEQ ID NO: 441 - RNA, 20 nt, Artificial Sequence
  Description of Artificial Sequence: Synthetic oligonucleotide
cgcgcagcccgcgggccugu

SEQ ID NO: 442 - RNA, 20 nt, Artificial Sequence
  Description of Artificial Sequence: Synthetic oligonucleotide
gugcgcucccccaccgcccc

SEQ ID NO: 443 - RNA, 20 nt, Artificial Sequence
  Description of Artificial Sequence: Synthetic oligonucleotide
cuuucauuuucuuccucagg

SEQ ID NO: 444 - RNA, 20 nt, Artificial Sequence
  Description of Artificial Sequence: Synthetic oligonucleotide
gaggcuggcccugggacagc

SEQ ID NO: 445 - RNA, 20 nt, Artificial Sequence
  Description of Artificial Sequence: Synthetic oligonucleotide
ugccacccucaccugaugcu

SEQ ID NO: 446 - RNA, 20 nt, Artificial Sequence
  Description of Artificial Sequence: Synthetic oligonucleotide
gagguggccgcgcagcccgc

SEQ ID NO: 447 - RNA, 20 nt, Artificial Sequence
  Description of Artificial Sequence: Synthetic oligonucleotide
uuucauuuucuuccucaggu

SEQ ID NO: 448 - RNA, 20 nt, Artificial Sequence
  Description of Artificial Sequence: Synthetic oligonucleotide
aucgaggggccaggagugau

SEQ ID NO: 449 - RNA, 20 nt, Artificial Sequence
  Description of Artificial Sequence: Synthetic oligonucleotide
cggcugguccgacgccccuc

SEQ ID NO: 450 - RNA, 20 nt, Artificial Sequence
  Description of Artificial Sequence: Synthetic oligonucleotide
cgggggccuggcggaaccgc

SEQ ID NO: 451 - RNA, 20 nt, Artificial Sequence
  Description of Artificial Sequence: Synthetic oligonucleotide
cuucucaccuguggggcacc

SEQ ID NO: 452 - RNA, 20 nt, Artificial Sequence
  Description of Artificial Sequence: Synthetic oligonucleotide
aggucgggccgggggcggug

SEQ ID NO: 453 - RNA, 20 nt, Artificial Sequence
  Description of Artificial Sequence: Synthetic oligonucleotide
cgcugcagccgccgccgccg

SEQ ID NO: 454 - RNA, 20 nt, Artificial Sequence
  Description of Artificial Sequence: Synthetic oligonucleotide
agagcaccaugcacuguggc

SEQ ID NO: 455 - RNA, 20 nt, Artificial Sequence
  Description of Artificial Sequence: Synthetic oligonucleotide
cccagccgaggucgggccgg

SEQ ID NO: 456 - RNA, 20 nt, Artificial Sequence
  Description of Artificial Sequence: Synthetic oligonucleotide
gacugcugugcaggaacacc

SEQ ID NO: 457 - RNA, 20 nt, Artificial Sequence
  Description of Artificial Sequence: Synthetic oligonucleotide
aggcucuggggucucaggcu

SEQ ID NO: 458 - RNA, 20 nt, Artificial Sequence
  Description of Artificial Sequence: Synthetic oligonucleotide
ugagguggccgcgcagcccg

SEQ ID NO: 459 - RNA, 20 nt, Artificial Sequence
  Description of Artificial Sequence: Synthetic oligonucleotide
gcgugcugaucccugggcuc

SEQ ID NO: 460 - RNA, 20 nt, Artificial Sequence
  Description of Artificial Sequence: Synthetic oligonucleotide
cuucgcccgcuugcgccggc

SEQ ID NO: 461 - RNA, 20 nt, Artificial Sequence
  Description of Artificial Sequence: Synthetic oligonucleotide
gcaccuggaaucgaggggcc

SEQ ID NO: 462 - RNA, 20 nt, Artificial Sequence
  Description of Artificial Sequence: Synthetic oligonucleotide
uccuaaagagaaagaugaaa

SEQ ID NO: 463 - RNA, 20 nt, Artificial Sequence
  Description of Artificial Sequence: Synthetic oligonucleotide
augcuuggggacugcugugc

SEQ ID NO: 464 - RNA, 20 nt, Artificial Sequence
  Description of Artificial Sequence: Synthetic oligonucleotide
aaugaaaagaaaaaccuucu

SEQ ID NO: 465 - RNA, 20 nt, Artificial Sequence
  Description of Artificial Sequence: Synthetic oligonucleotide
gcggaaccgccgggguccgc

SEQ ID NO: 466 - RNA, 20 nt, Artificial Sequence
  Description of Artificial Sequence: Synthetic oligonucleotide
gaggucgggccgggggcggu

SEQ ID NO: 467 - RNA, 20 nt, Artificial Sequence
  Description of Artificial Sequence: Synthetic oligonucleotide
auuauaggcucuggggucuc

SEQ ID NO: 468 - RNA, 20 nt, Artificial Sequence
  Description of Artificial Sequence: Synthetic oligonucleotide
ucacuuucauuuucuuccuc

SEQ ID NO: 469 - RNA, 20 nt, Artificial Sequence
  Description of Artificial Sequence: Synthetic oligonucleotide
ucggagccgccugcuguccc

SEQ ID NO: 470 - RNA, 20 nt, Artificial Sequence
  Description of Artificial Sequence: Synthetic oligonucleotide
agccgaggucgggccggggg

SEQ ID NO: 471 - RNA, 20 nt, Artificial Sequence
  Description of Artificial Sequence: Synthetic oligonucleotide
aaagcuagaagaaaaacuuc

SEQ ID NO: 472 - RNA, 20 nt, Artificial Sequence
  Description of Artificial Sequence: Synthetic oligonucleotide
uccucagguggggcuugagg

SEQ ID NO: 473 - RNA, 20 nt, Artificial Sequence
  Description of Artificial Sequence: Synthetic oligonucleotide
cggcgguuccgccaggcccc

SEQ ID NO: 474 - RNA, 20 nt, Artificial Sequence
  Description of Artificial Sequence: Synthetic oligonucleotide
ugcaucugucucacaugcuu

SEQ ID NO: 475 - RNA, 20 nt, Artificial Sequence
  Description of Artificial Sequence: Synthetic oligonucleotide
ggcgguuccgccaggccccc

SEQ ID NO: 476 - RNA, 20 nt, Artificial Sequence
  Description of Artificial Sequence: Synthetic oligonucleotide
accgggacggaggcuggccc

SEQ ID NO: 477 - RNA, 20 nt, Artificial Sequence
  Description of Artificial Sequence: Synthetic oligonucleotide
caccgcccccggcccgaccu

SEQ ID NO: 478 - RNA, 20 nt, Artificial Sequence
  Description of Artificial Sequence: Synthetic oligonucleotide
cgccaggcccccggggggcg

SEQ ID NO: 479 - RNA, 20 nt, Artificial Sequence
  Description of Artificial Sequence: Synthetic oligonucleotide
ggggugagcucuuccucuuc

SEQ ID NO: 480 - RNA, 20 nt, Artificial Sequence
  Description of Artificial Sequence: Synthetic oligonucleotide
accauuucaucuuucucuuu

SEQ ID NO: 481 - RNA, 20 nt, Artificial Sequence
  Description of Artificial Sequence: Synthetic oligonucleotide
ggccucgccccccgggggcc

SEQ ID NO: 482 - RNA, 20 nt, Artificial Sequence
  Description of Artificial Sequence: Synthetic oligonucleotide
gcccccggcccgaccucggc

SEQ ID NO: 483 - RNA, 20 nt, Artificial Sequence
  Description of Artificial Sequence: Synthetic oligonucleotide
uggggcuugaggggguggug

SEQ ID NO: 484 - RNA, 20 nt, Artificial Sequence
  Description of Artificial Sequence: Synthetic oligonucleotide
gccgggguccgcagggccuc

SEQ ID NO: 485 - RNA, 20 nt, Artificial Sequence
  Description of Artificial Sequence: Synthetic oligonucleotide
cuucuuuuccuucucugcuu

SEQ ID NO: 486 - RNA, 20 nt, Artificial Sequence
  Description of Artificial Sequence: Synthetic oligonucleotide
ccuccgcgggccucgccccc

SEQ ID NO: 487 - RNA, 20 nt, Artificial Sequence
  Description of Artificial Sequence: Synthetic oligonucleotide
cuccgcgggccucgcccccc

SEQ ID NO: 488 - RNA, 20 nt, Artificial Sequence
  Description of Artificial Sequence: Synthetic oligonucleotide
ggucgggccgggggcggugg

SEQ ID NO: 489 - RNA, 20 nt, Artificial Sequence
  Description of Artificial Sequence: Synthetic oligonucleotide
uggaauggaugucacacuuu

SEQ ID NO: 490 - RNA, 20 nt, Artificial Sequence
  Description of Artificial Sequence: Synthetic oligonucleotide
cuuccucagguggggcuuga

SEQ ID NO: 491 - RNA, 20 nt, Artificial Sequence
  Description of Artificial Sequence: Synthetic oligonucleotide
guggggcuugaggggguggu

SEQ ID NO: 492 - RNA, 20 nt, Artificial Sequence
  Description of Artificial Sequence: Synthetic oligonucleotide
gcggcugcagcggcagcaac

SEQ ID NO: 493 - RNA, 20 nt, Artificial Sequence
  Description of Artificial Sequence: Synthetic oligonucleotide
cccccggggggcgaggcccg

SEQ ID NO: 494 - RNA, 20 nt, Artificial Sequence
  Description of Artificial Sequence: Synthetic oligonucleotide
uaaugaaaagaaaaaccuuc

SEQ ID NO: 495 - RNA, 20 nt, Artificial Sequence
  Description of Artificial Sequence: Synthetic oligonucleotide
cgcggcggcggcggcugcag

SEQ ID NO: 496 - RNA, 20 nt, Artificial Sequence
  Description of Artificial Sequence: Synthetic oligonucleotide
ucagguggggcuugaggggg

SEQ ID NO: 497 - RNA, 20 nt, Artificial Sequence
  Description of Artificial Sequence: Synthetic oligonucleotide
gguggggcuugagggggugg

SEQ ID NO: 498 - RNA, 20 nt, Artificial Sequence
  Description of Artificial Sequence: Synthetic oligonucleotide
uggaaaugacuaugauuuaa

SEQ ID NO: 499 - RNA, 20 nt, Artificial Sequence
  Description of Artificial Sequence: Synthetic oligonucleotide
ggggcuugaggggguggugg

SEQ ID NO: 500 - RNA, 20 nt, Artificial Sequence
  Description of Artificial Sequence: Synthetic oligonucleotide
cgaggucgggccgggggcgg

SEQ ID NO: 501 - RNA, 20 nt, Artificial Sequence
  Description of Artificial Sequence: Synthetic oligonucleotide
ggcggcagccgcggcggcgg

SEQ ID NO: 502 - RNA, 20 nt, Artificial Sequence
  Description of Artificial Sequence: Synthetic oligonucleotide
gaaggcggcagccgcggcgg

SEQ ID NO: 503 - RNA, 20 nt, Artificial Sequence
  Description of Artificial Sequence: Synthetic oligonucleotide
agugcgacagguucgcuaca

SEQ ID NO: 504 - RNA, 20 nt, Artificial Sequence
  Description of Artificial Sequence: Synthetic oligonucleotide
uggaauagcagagacuccgg

SEQ ID NO: 505 - RNA, 20 nt, Artificial Sequence
  Description of Artificial Sequence: Synthetic oligonucleotide
cuaaauaacugugaacucgg

SEQ ID NO: 506 - RNA, 20 nt, Artificial Sequence
  Description of Artificial Sequence: Synthetic oligonucleotide
ugcuauuccaguuuccaugg

SEQ ID NO: 507 - RNA, 20 nt, Artificial Sequence
  Description of Artificial Sequence: Synthetic oligonucleotide
cagacccaggcacgacagua

SEQ ID NO: 508 - RNA, 20 nt, Artificial Sequence
  Description of Artificial Sequence: Synthetic oligonucleotide
uuucugaaacaggaucgugu

SEQ ID NO: 509 - RNA, 20 nt, Artificial Sequence
  Description of Artificial Sequence: Synthetic oligonucleotide
ugagaagucauccggucaug

SEQ ID NO: 510 - RNA, 20 nt, Artificial Sequence
  Description of Artificial Sequence: Synthetic oligonucleotide
gaauugcagaccaguuuuug

SEQ ID NO: 511 - RNA, 20 nt, Artificial Sequence
  Description of Artificial Sequence: Synthetic oligonucleotide
cgaguugccacauuucgcaa

SEQ ID NO: 512 - RNA, 20 nt, Artificial Sequence
  Description of Artificial Sequence: Synthetic oligonucleotide
cugaaacaggaucguguggg

SEQ ID NO: 513 - RNA, 20 nt, Artificial Sequence
  Description of Artificial Sequence: Synthetic oligonucleotide
ggcggcccgagauguuaucu

SEQ ID NO: 514 - RNA, 20 nt, Artificial Sequence
  Description of Artificial Sequence: Synthetic oligonucleotide
uguauaccacaccuugcaua

SEQ ID NO: 515 - RNA, 20 nt, Artificial Sequence
  Description of Artificial Sequence: Synthetic oligonucleotide
ucuuagugaaaagcaaacac

SEQ ID NO: 516 - RNA, 20 nt, Artificial Sequence
  Description of Artificial Sequence: Synthetic oligonucleotide
auguauaccacaccuugcau

SEQ ID NO: 517 - RNA, 20 nt, Artificial Sequence
  Description of Artificial Sequence: Synthetic oligonucleotide
gggauuuggcaaccuuaaca

SEQ ID NO: 518 - RNA, 20 nt, Artificial Sequence
  Description of Artificial Sequence: Synthetic oligonucleotide
uugugccaccucucccugag

SEQ ID NO: 519 - RNA, 20 nt, Artificial Sequence
  Description of Artificial Sequence: Synthetic oligonucleotide
ggaucugaccgcccuaugca

SEQ ID NO: 520 - RNA, 20 nt, Artificial Sequence
  Description of Artificial Sequence: Synthetic oligonucleotide
accaagaccuguuaccacca

SEQ ID NO: 521 - RNA, 20 nt, Artificial Sequence
  Description of Artificial Sequence: Synthetic oligonucleotide
cgucauggucuuaucaacuu

SEQ ID NO: 522 - RNA, 20 nt, Artificial Sequence
  Description of Artificial Sequence: Synthetic oligonucleotide
ugaagucuaguugaugacua

SEQ ID NO: 523 - RNA, 20 nt, Artificial Sequence
  Description of Artificial Sequence: Synthetic oligonucleotide
cacaguuauuuagagcguca

SEQ ID NO: 524 - RNA, 20 nt, Artificial Sequence
  Description of Artificial Sequence: Synthetic oligonucleotide
ucggcaguaauaucucuggg

SEQ ID NO: 525 - RNA, 20 nt, Artificial Sequence
  Description of Artificial Sequence: Synthetic oligonucleotide
ugccaacaguauuggagcug

SEQ ID NO: 526 - RNA, 20 nt, Artificial Sequence
  Description of Artificial Sequence: Synthetic oligonucleotide
gcaucugucucacaugcuug

SEQ ID NO: 527 - RNA, 20 nt, Artificial Sequence
  Description of Artificial Sequence: Synthetic oligonucleotide
agugccaacaguauuggagc

SEQ ID NO: 528 - RNA, 20 nt, Artificial Sequence
  Description of Artificial Sequence: Synthetic oligonucleotide
acaucugcaguccaaaggau

SEQ ID NO: 529 - RNA, 20 nt, Artificial Sequence
  Description of Artificial Sequence: Synthetic oligonucleotide
ggcacaaacugaacggcugg

SEQ ID NO: 530 - RNA, 20 nt, Artificial Sequence
  Description of Artificial Sequence: Synthetic oligonucleotide
uggcaguacgacugccagca

SEQ ID NO: 531 - RNA, 20 nt, Artificial Sequence
  Description of Artificial Sequence: Synthetic oligonucleotide
aagaugagcagauugaacau

SEQ ID NO: 532 - RNA, 20 nt, Artificial Sequence
  Description of Artificial Sequence: Synthetic oligonucleotide
gguaauuauuauaggcucug

SEQ ID NO: 533 - RNA, 20 nt, Artificial Sequence
  Description of Artificial Sequence: Synthetic oligonucleotide
cgcggaggcucuuucuugcg

SEQ ID NO: 534 - RNA, 20 nt, Artificial Sequence
  Description of Artificial Sequence: Synthetic oligonucleotide
auaagugacgaugugauugu

SEQ ID NO: 535 - RNA, 20 nt, Artificial Sequence
  Description of Artificial Sequence: Synthetic oligonucleotide
ggcaguacgacugccagcag

SEQ ID NO: 536 - RNA, 20 nt, Artificial Sequence
  Description of Artificial Sequence: Synthetic oligonucleotide
ugcccgaacaaauugacacu

SEQ ID NO: 537 - RNA, 20 nt, Artificial Sequence
  Description of Artificial Sequence: Synthetic oligonucleotide
ggaaaacaucugcaguccaa

SEQ ID NO: 538 - RNA, 20 nt, Artificial Sequence
  Description of Artificial Sequence: Synthetic oligonucleotide
acugaauacagcagugcgac

SEQ ID NO: 539 - RNA, 20 nt, Artificial Sequence
  Description of Artificial Sequence: Synthetic oligonucleotide
uuugcuuuucacuaagaacu

SEQ ID NO: 540 - RNA, 20 nt, Artificial Sequence
  Description of Artificial Sequence: Synthetic oligonucleotide
cuggcagccaccugacagua

SEQ ID NO: 541 - RNA, 20 nt, Artificial Sequence
  Description of Artificial Sequence: Synthetic oligonucleotide
gcagacccaggcacgacagu

SEQ ID NO: 542 - RNA, 20 nt, Artificial Sequence
  Description of Artificial Sequence: Synthetic oligonucleotide
gggacacaggcuuauuauug

SEQ ID NO: 543 - RNA, 20 nt, Artificial Sequence
  Description of Artificial Sequence: Synthetic oligonucleotide
uggcuacucgugugugccug

SEQ ID NO: 544 - RNA, 20 nt, Artificial Sequence
  Description of Artificial Sequence: Synthetic oligonucleotide
aacaucugcaguccaaagga

SEQ ID NO: 545 - RNA, 20 nt, Artificial Sequence
  Description of Artificial Sequence: Synthetic oligonucleotide
cccaggcacgacaguagggc

SEQ ID NO: 546 - RNA, 20 nt, Artificial Sequence
  Description of Artificial Sequence: Synthetic oligonucleotide
cuuagugaaaagcaaacaca

SEQ ID NO: 547 - RNA, 20 nt, Artificial Sequence
  Description of Artificial Sequence: Synthetic oligonucleotide
ucucccgcaaagaagagucg

SEQ ID NO: 548 - RNA, 20 nt, Artificial Sequence
  Description of Artificial Sequence: Synthetic oligonucleotide
gucaauuuguucgggcaugu

SEQ ID NO: 549 - RNA, 20 nt, Artificial Sequence
  Description of Artificial Sequence: Synthetic oligonucleotide
cugcuauuccaguuuccaug

SEQ ID NO: 550 - RNA, 20 nt, Artificial Sequence
  Description of Artificial Sequence: Synthetic oligonucleotide
gaauaagagccccgagccca

SEQ ID NO: 551 - RNA, 20 nt, Artificial Sequence
  Description of Artificial Sequence: Synthetic oligonucleotide
aagugagccugaagaaccau

SEQ ID NO: 552 - RNA, 20 nt, Artificial Sequence
  Description of Artificial Sequence: Synthetic oligonucleotide
uuugcuuucuucguuaggug

SEQ ID NO: 553 - RNA, 20 nt, Artificial Sequence
  Description of Artificial Sequence: Synthetic oligonucleotide
auuucugaaacaggaucgug

SEQ ID NO: 554 - RNA, 20 nt, Artificial Sequence
  Description of Artificial Sequence: Synthetic oligonucleotide
gagagguggcacaaacugaa

SEQ ID NO: 555 - RNA, 20 nt, Artificial Sequence
  Description of Artificial Sequence: Synthetic oligonucleotide
guccguuggcuucauaaagu

SEQ ID NO: 556 - RNA, 20 nt, Artificial Sequence
  Description of Artificial Sequence: Synthetic oligonucleotide
acgacaguagggccggccug

SEQ ID NO: 557 - RNA, 20 nt, Artificial Sequence
  Description of Artificial Sequence: Synthetic oligonucleotide
auaccacaccuugcauaggg

SEQ ID NO: 558 - RNA, 20 nt, Artificial Sequence
  Description of Artificial Sequence: Synthetic oligonucleotide
gcucuaaauaacugugaacu

SEQ ID NO: 559 - RNA, 20 nt, Artificial Sequence
  Description of Artificial Sequence: Synthetic oligonucleotide
aggagggaauccuauggcug

SEQ ID NO: 560 - RNA, 20 nt, Artificial Sequence
  Description of Artificial Sequence: Synthetic oligonucleotide
auaaauaaagguuugacucg

SEQ ID NO: 561 - RNA, 20 nt, Artificial Sequence
  Description of Artificial Sequence: Synthetic oligonucleotide
cuggcgaggcagcguauaca

SEQ ID NO: 562 - RNA, 20 nt, Artificial Sequence
  Description of Artificial Sequence: Synthetic oligonucleotide
agcugaucuuggagccaugg

SEQ ID NO: 563 - RNA, 20 nt, Artificial Sequence
  Description of Artificial Sequence: Synthetic oligonucleotide
uaaagguuugacucguggag

SEQ ID NO: 564 - RNA, 20 nt, Artificial Sequence
  Description of Artificial Sequence: Synthetic oligonucleotide
aguagccauuccuuacuguc

SEQ ID NO: 565 - RNA, 20 nt, Artificial Sequence
  Description of Artificial Sequence: Synthetic oligonucleotide
guuuuccacucagggagagg

SEQ ID NO: 566 - RNA, 20 nt, Artificial Sequence
  Description of Artificial Sequence: Synthetic oligonucleotide
uggaccacaacagacccaga

SEQ ID NO: 567 - RNA, 20 nt, Artificial Sequence
  Description of Artificial Sequence: Synthetic oligonucleotide
gaugaauuagcugaaacaca

SEQ ID NO: 568 - RNA, 20 nt, Artificial Sequence
  Description of Artificial Sequence: Synthetic oligonucleotide
agugagccugaagaaccauc

SEQ ID NO: 569 - RNA, 20 nt, Artificial Sequence
  Description of Artificial Sequence: Synthetic oligonucleotide
cggaaccgccgggguccgca

SEQ ID NO: 570 - RNA, 20 nt, Artificial Sequence
  Description of Artificial Sequence: Synthetic oligonucleotide
ucaacuucggcaucuauaag

SEQ ID NO: 571 - RNA, 20 nt, Artificial Sequence
  Description of Artificial Sequence: Synthetic oligonucleotide
guggggcaccuggaaucgag

SEQ ID NO: 572 - RNA, 20 nt, Artificial Sequence
  Description of Artificial Sequence: Synthetic oligonucleotide
auaguuuccuuugcgaaaug

SEQ ID NO: 573 - RNA, 20 nt, Artificial Sequence
  Description of Artificial Sequence: Synthetic oligonucleotide
ggaauagcagagacuccgga

SEQ ID NO: 574 - RNA, 20 nt, Artificial Sequence
  Description of Artificial Sequence: Synthetic oligonucleotide
agccaccugacaguaaggaa

SEQ ID NO: 575 - RNA, 20 nt, Artificial Sequence
  Description of Artificial Sequence: Synthetic oligonucleotide
auggcucagccaaucacucc

SEQ ID NO: 576 - RNA, 20 nt, Artificial Sequence
  Description of Artificial Sequence: Synthetic oligonucleotide
agcggcagcaaccgggacgg

SEQ ID NO: 577 - RNA, 20 nt, Artificial Sequence
  Description of Artificial Sequence: Synthetic oligonucleotide
aguuggaagcgaauccccca

SEQ ID NO: 578 - RNA, 20 nt, Artificial Sequence
  Description of Artificial Sequence: Synthetic oligonucleotide
cuuuuagcccaaagaaacug

SEQ ID NO: 579 - RNA, 20 nt, Artificial Sequence
  Description of Artificial Sequence: Synthetic oligonucleotide
aagauguagcuucuagcaac

SEQ ID NO: 580 - RNA, 20 nt, Artificial Sequence
  Description of Artificial Sequence: Synthetic oligonucleotide
ccggcccuacugucgugccu

SEQ ID NO: 581 - RNA, 20 nt, Artificial Sequence
  Description of Artificial Sequence: Synthetic oligonucleotide
agagccgacuuccucaugac

SEQ ID NO: 582 - RNA, 20 nt, Artificial Sequence
  Description of Artificial Sequence: Synthetic oligonucleotide
aauaauacucaucuucugag

SEQ ID NO: 583 - RNA, 20 nt, Artificial Sequence
  Description of Artificial Sequence: Synthetic oligonucleotide
cugcuucuugagaagucauc

SEQ ID NO: 584 - RNA, 20 nt, Artificial Sequence
  Description of Artificial Sequence: Synthetic oligonucleotide
aggccuucugcuaaagccac

SEQ ID NO: 585 - RNA, 20 nt, Artificial Sequence
  Description of Artificial Sequence: Synthetic oligonucleotide
gaaugacaacuuccaaugcc

SEQ ID NO: 586 - RNA, 20 nt, Artificial Sequence
  Description of Artificial Sequence: Synthetic oligonucleotide
ccgcaagaaagagccuccgc

SEQ ID NO: 587 - RNA, 20 nt, Artificial Sequence
  Description of Artificial Sequence: Synthetic oligonucleotide
ugcugcuucagcacacccag

SEQ ID NO: 588 - RNA, 20 nt, Artificial Sequence
  Description of Artificial Sequence: Synthetic oligonucleotide
aacuuccaaugccuggccaa

SEQ ID NO: 589 - RNA, 20 nt, Artificial Sequence
  Description of Artificial Sequence: Synthetic oligonucleotide
aaagguuugacucguggagc

SEQ ID NO: 590 - RNA, 20 nt, Artificial Sequence
  Description of Artificial Sequence: Synthetic oligonucleotide
gugccaacaguauuggagcu

SEQ ID NO: 591 - RNA, 20 nt, Artificial Sequence
  Description of Artificial Sequence: Synthetic oligonucleotide
gccacuagugccaacaguau

SEQ ID NO: 592 - RNA, 20 nt, Artificial Sequence
  Description of Artificial Sequence: Synthetic oligonucleotide
uagggcaagcuaccuuguua

SEQ ID NO: 593 - RNA, 20 nt, Artificial Sequence
  Description of Artificial Sequence: Synthetic oligonucleotide
caacucucucccuuaagcac

SEQ ID NO: 594 - RNA, 20 nt, Artificial Sequence
  Description of Artificial Sequence: Synthetic oligonucleotide
ucauccggucaugaggaagu

SEQ ID NO: 595 - RNA, 20 nt, Artificial Sequence
  Description of Artificial Sequence: Synthetic oligonucleotide
gaugccuggccauucucaaa

SEQ ID NO: 596 - RNA, 20 nt, Artificial Sequence
  Description of Artificial Sequence: Synthetic oligonucleotide
uguuuuccagauauuaucag

SEQ ID NO: 597 - RNA, 20 nt, Artificial Sequence
  Description of Artificial Sequence: Synthetic oligonucleotide
augcaucugucucacaugcu

SEQ ID NO: 598 - RNA, 20 nt, Artificial Sequence
  Description of Artificial Sequence: Synthetic oligonucleotide
gauuccacgacucuucuuug

SEQ ID NO: 599 - RNA, 20 nt, Artificial Sequence
  Description of Artificial Sequence: Synthetic oligonucleotide
ugguagcagugcaguaccuc

SEQ ID NO: 600 - RNA, 20 nt, Artificial Sequence
  Description of Artificial Sequence: Synthetic oligonucleotide
aacucucucccuuaagcacu

SEQ ID NO: 601 - RNA, 20 nt, Artificial Sequence
  Description of Artificial Sequence: Synthetic oligonucleotide
ucgacuuacagcuuguccgu

SEQ ID NO: 602 - RNA, 20 nt, Artificial Sequence
  Description of Artificial Sequence: Synthetic oligonucleotide
aggagguccuuacuugguag

SEQ ID NO: 603 - RNA, 20 nt, Artificial Sequence
  Description of Artificial Sequence: Synthetic oligonucleotide
gcacuguggcuggguaguua

SEQ ID NO: 604 - RNA, 20 nt, Artificial Sequence
  Description of Artificial Sequence: Synthetic oligonucleotide
auagguagaguacagagaga

SEQ ID NO: 605 - RNA, 20 nt, Artificial Sequence
  Description of Artificial Sequence: Synthetic oligonucleotide
cggaccccggcgguuccgcc

SEQ ID NO: 606 - RNA, 20 nt, Artificial Sequence
  Description of Artificial Sequence: Synthetic oligonucleotide
uuuucuaggagggaauccua

SEQ ID NO: 607 - RNA, 20 nt, Artificial Sequence
  Description of Artificial Sequence: Synthetic oligonucleotide
gagcaccaugcacuguggcu

SEQ ID NO: 608 - RNA, 20 nt, Artificial Sequence
  Description of Artificial Sequence: Synthetic oligonucleotide
ugcccacuuuaugaagccaa

SEQ ID NO: 609 - RNA, 20 nt, Artificial Sequence
  Description of Artificial Sequence: Synthetic oligonucleotide
cucccuuaagcacugggauc

SEQ ID NO: 610 - RNA, 20 nt, Artificial Sequence
  Description of Artificial Sequence: Synthetic oligonucleotide
gcaaagaagagucguggaau

SEQ ID NO: 611 - RNA, 20 nt, Artificial Sequence
  Description of Artificial Sequence: Synthetic oligonucleotide
cccgcggaggcucuuucuug

SEQ ID NO: 612 - RNA, 20 nt, Artificial Sequence
  Description of Artificial Sequence: Synthetic oligonucleotide
agaugauccugcagcaacau

SEQ ID NO: 613 - RNA, 20 nt, Artificial Sequence
  Description of Artificial Sequence: Synthetic oligonucleotide
aauugcagaccaguuuuugg

SEQ ID NO: 614 - RNA, 20 nt, Artificial Sequence
  Description of Artificial Sequence: Synthetic oligonucleotide
ugugguccacugauaauauc

SEQ ID NO: 615 - RNA, 20 nt, Artificial Sequence
  Description of Artificial Sequence: Synthetic oligonucleotide
uuuagcuaaaaagacaggaa

SEQ ID NO: 616 - RNA, 20 nt, Artificial Sequence
  Description of Artificial Sequence: Synthetic oligonucleotide
ucugcuauuccaguuuccau

SEQ ID NO: 617 - RNA, 20 nt, Artificial Sequence
  Description of Artificial Sequence: Synthetic oligonucleotide
acagcaggcggcuccgagaa

SEQ ID NO: 618 - RNA, 20 nt, Artificial Sequence
  Description of Artificial Sequence: Synthetic oligonucleotide
augucacacuuuuggaagcc

SEQ ID NO: 619 - RNA, 20 nt, Artificial Sequence
  Description of Artificial Sequence: Synthetic oligonucleotide
uucuucccagauaacaucuc

SEQ ID NO: 620 - RNA, 20 nt, Artificial Sequence
  Description of Artificial Sequence: Synthetic oligonucleotide
cauguauacgcugccucgcc

SEQ ID NO: 621 - RNA, 20 nt, Artificial Sequence
  Description of Artificial Sequence: Synthetic oligonucleotide
gcugagugggcugcgagaag

SEQ ID NO: 622 - RNA, 20 nt, Artificial Sequence
  Description of Artificial Sequence: Synthetic oligonucleotide
ucguuggcgugcugaucccu

SEQ ID NO: 623 - RNA, 20 nt, Artificial Sequence
  Description of Artificial Sequence: Synthetic oligonucleotide
ucggaccagccggcgcaagc

SEQ ID NO: 624 - RNA, 20 nt, Artificial Sequence
  Description of Artificial Sequence: Synthetic oligonucleotide
agccauuccuuacugucagg

SEQ ID NO: 625 - RNA, 20 nt, Artificial Sequence
  Description of Artificial Sequence: Synthetic oligonucleotide
ugugauuguuggccgaugcc

SEQ ID NO: 626 - RNA, 20 nt, Artificial Sequence
  Description of Artificial Sequence: Synthetic oligonucleotide
aauaauaagccugugucccu

SEQ ID NO: 627 - RNA, 20 nt, Artificial Sequence
  Description of Artificial Sequence: Synthetic oligonucleotide
gguuccgccaggcccccggg

SEQ ID NO: 628 - RNA, 20 nt, Artificial Sequence
  Description of Artificial Sequence: Synthetic oligonucleotide
uccaauacuguuggcacuag

SEQ ID NO: 629 - RNA, 20 nt, Artificial Sequence
  Description of Artificial Sequence: Synthetic oligonucleotide
uguagcugaucuuggagcca

SEQ ID NO: 630 - RNA, 20 nt, Artificial Sequence
  Description of Artificial Sequence: Synthetic oligonucleotide
uccaugggggucgcagaccc

SEQ ID NO: 631 - RNA, 20 nt, Artificial Sequence
  Description of Artificial Sequence: Synthetic oligonucleotide
aaaucccuuugagaauggcc

SEQ ID NO: 632 - RNA, 20 nt, Artificial Sequence
  Description of Artificial Sequence: Synthetic oligonucleotide
gguggcacaaacugaacggc

SEQ ID NO: 633 - RNA, 20 nt, Artificial Sequence
  Description of Artificial Sequence: Synthetic oligonucleotide
aacuggaauagcagagacuc

SEQ ID NO: 634 - RNA, 20 nt, Artificial Sequence
  Description of Artificial Sequence: Synthetic oligonucleotide
ugcagcggcagcaaccggga

SEQ ID NO: 635 - RNA, 20 nt, Artificial Sequence
  Description of Artificial Sequence: Synthetic oligonucleotide
ucuuauuccuauguugcugc

SEQ ID NO: 636 - RNA, 20 nt, Artificial Sequence
  Description of Artificial Sequence: Synthetic oligonucleotide
uauacauggcccccaaaaac

SEQ ID NO: 637 - RNA, 20 nt, Artificial Sequence
  Description of Artificial Sequence: Synthetic oligonucleotide
aaugccuggccaagggacac

SEQ ID NO: 638 - RNA, 20 nt, Artificial Sequence
  Description of Artificial Sequence: Synthetic oligonucleotide
aagaaacuguggugucucgu

SEQ ID NO: 639 - RNA, 20 nt, Artificial Sequence
  Description of Artificial Sequence: Synthetic oligonucleotide
uuuaaaugcagcugcaguug

SEQ ID NO: 640 - RNA, 20 nt, Artificial Sequence
  Description of Artificial Sequence: Synthetic oligonucleotide
ugaggcccugcggaccccgg

SEQ ID NO: 641 - RNA, 20 nt, Artificial Sequence
  Description of Artificial Sequence: Synthetic oligonucleotide
agguaauuauuauaggcucu

SEQ ID NO: 642 - RNA, 20 nt, Artificial Sequence
  Description of Artificial Sequence: Synthetic oligonucleotide
guguuuugaucggguguucu

SEQ ID NO: 643 - RNA, 20 nt, Artificial Sequence
  Description of Artificial Sequence: Synthetic oligonucleotide
gaugaugacuuugaguucac

SEQ ID NO: 644 - RNA, 20 nt, Artificial Sequence
  Description of Artificial Sequence: Synthetic oligonucleotide
auccaagugucaauuuguuc

SEQ ID NO: 645 - RNA, 20 nt, Artificial Sequence
  Description of Artificial Sequence: Synthetic oligonucleotide
ggggccuggcggaaccgccg

SEQ ID NO: 646 - RNA, 20 nt, Artificial Sequence
  Description of Artificial Sequence: Synthetic oligonucleotide
gauguuuuccacucagggag

SEQ ID NO: 647 - RNA, 20 nt, Artificial Sequence
  Description of Artificial Sequence: Synthetic oligonucleotide
aaugcagcugcaguuguggu

SEQ ID NO: 648 - RNA, 20 nt, Artificial Sequence
  Description of Artificial Sequence: Synthetic oligonucleotide
cagcagagcaccaugcacug

SEQ ID NO: 649 - RNA, 20 nt, Artificial Sequence
  Description of Artificial Sequence: Synthetic oligonucleotide
cugagugggcugcgagaagc

SEQ ID NO: 650 - RNA, 20 nt, Artificial Sequence
  Description of Artificial Sequence: Synthetic oligonucleotide
cuuuauagagguuccagaag

SEQ ID NO: 651 - RNA, 20 nt, Artificial Sequence
  Description of Artificial Sequence: Synthetic oligonucleotide
acaguuacaaaguuuuggaa

SEQ ID NO: 652 - RNA, 20 nt, Artificial Sequence
  Description of Artificial Sequence: Synthetic oligonucleotide
caacuuccaaugccuggcca

SEQ ID NO: 653 - RNA, 20 nt, Artificial Sequence
  Description of Artificial Sequence: Synthetic oligonucleotide
aacucggcaguaauaucucu

SEQ ID NO: 654 - RNA, 20 nt, Artificial Sequence
  Description of Artificial Sequence: Synthetic oligonucleotide
aacuacccagccacagugca

SEQ ID NO: 655 - RNA, 20 nt, Artificial Sequence
  Description of Artificial Sequence: Synthetic oligonucleotide
acugcagauguuuuccacuc

SEQ ID NO: 656 - RNA, 20 nt, Artificial Sequence
  Description of Artificial Sequence: Synthetic oligonucleotide
uauaaggugcuucuaauugu

SEQ ID NO: 657 - RNA, 20 nt, Artificial Sequence
  Description of Artificial Sequence: Synthetic oligonucleotide
cuccgagaacgggucugagg

SEQ ID NO: 658 - RNA, 20 nt, Artificial Sequence
  Description of Artificial Sequence: Synthetic oligonucleotide
aaaaccuucugggucuguug

SEQ ID NO: 659 - RNA, 20 nt, Artificial Sequence
  Description of Artificial Sequence: Synthetic oligonucleotide
ugggcauuuuugcuugaucu

SEQ ID NO: 660 - RNA, 20 nt, Artificial Sequence
  Description of Artificial Sequence: Synthetic oligonucleotide
gguugccaaaucccauccuu

SEQ ID NO: 661 - RNA, 20 nt, Artificial Sequence
  Description of Artificial Sequence: Synthetic oligonucleotide
cagcaggcggcuccgagaac

SEQ ID NO: 662 - RNA, 20 nt, Artificial Sequence
  Description of Artificial Sequence: Synthetic oligonucleotide
uuccccagcuccaauacugu

SEQ ID NO: 663 - RNA, 20 nt, Artificial Sequence
  Description of Artificial Sequence: Synthetic oligonucleotide
auacuguuggcacuaguggc

SEQ ID NO: 664 - RNA, 20 nt, Artificial Sequence
  Description of Artificial Sequence: Synthetic oligonucleotide
cuucagcacacccaggggaa

SEQ ID NO: 665 - RNA, 20 nt, Artificial Sequence
  Description of Artificial Sequence: Synthetic oligonucleotide
ugguagagcaagaguuuaac

SEQ ID NO: 666 - RNA, 20 nt, Artificial Sequence
  Description of Artificial Sequence: Synthetic oligonucleotide
cccgcaagaaagagccuccg

SEQ ID NO: 667 - RNA, 20 nt, Artificial Sequence
  Description of Artificial Sequence: Synthetic oligonucleotide
uguggggcaccuggaaucga

SEQ ID NO: 668 - RNA, 20 nt, Artificial Sequence
  Description of Artificial Sequence: Synthetic oligonucleotide
cggcuccgagaacgggucug

SEQ ID NO: 669 - RNA, 20 nt, Artificial Sequence
  Description of Artificial Sequence: Synthetic oligonucleotide
cagguucgcuacacggcuuc

SEQ ID NO: 670 - RNA, 20 nt, Artificial Sequence
  Description of Artificial Sequence: Synthetic oligonucleotide
uugccagcuucucaccugug

SEQ ID NO: 671 - RNA, 20 nt, Artificial Sequence
  Description of Artificial Sequence: Synthetic oligonucleotide
guuuguuuuccuuaccuugg

SEQ ID NO: 672 - RNA, 20 nt, Artificial Sequence
  Description of Artificial Sequence: Synthetic oligonucleotide
gugccuguggcuuuagcaga

SEQ ID NO: 673 - RNA, 20 nt, Artificial Sequence
  Description of Artificial Sequence: Synthetic oligonucleotide
acccccucaagccccaccug

SEQ ID NO: 674 - RNA, 20 nt, Artificial Sequence
  Description of Artificial Sequence: Synthetic oligonucleotide
aacucacccgaugguucuuc

SEQ ID NO: 675 - RNA, 20 nt, Artificial Sequence
  Description of Artificial Sequence: Synthetic oligonucleotide
gcuuucuucguuaggugugg

SEQ ID NO: 676 - RNA, 20 nt, Artificial Sequence
  Description of Artificial Sequence: Synthetic oligonucleotide
caaacaaguaaauauggaac

SEQ ID NO: 677 - RNA, 20 nt, Artificial Sequence
  Description of Artificial Sequence: Synthetic oligonucleotide
gcagcaaccgggacggaggc

SEQ ID NO: 678 - RNA, 20 nt, Artificial Sequence
  Description of Artificial Sequence: Synthetic oligonucleotide
aaagauucagcugacauuug

SEQ ID NO: 679 - RNA, 20 nt, Artificial Sequence
  Description of Artificial Sequence: Synthetic oligonucleotide
uguuugcugaccacagccau

SEQ ID NO: 680 - RNA, 20 nt, Artificial Sequence
  Description of Artificial Sequence: Synthetic oligonucleotide
aggagaagcugcugguauca

SEQ ID NO: 681 - RNA, 20 nt, Artificial Sequence
  Description of Artificial Sequence: Synthetic oligonucleotide
uguccguuggcuucauaaag

SEQ ID NO: 682 - RNA, 20 nt, Artificial Sequence
  Description of Artificial Sequence: Synthetic oligonucleotide
cuuggagccauggugguaac

SEQ ID NO: 683 - RNA, 20 nt, Artificial Sequence
  Description of Artificial Sequence: Synthetic oligonucleotide
ccgcgggccucgccccccgg

SEQ ID NO: 684 - RNA, 20 nt, Artificial Sequence
  Description of Artificial Sequence: Synthetic oligonucleotide
uugcuuuuagcuaaaaagac

SEQ ID NO: 685 - RNA, 20 nt, Artificial Sequence
  Description of Artificial Sequence: Synthetic oligonucleotide
cggcggcccgagauguuauc

SEQ ID NO: 686 - RNA, 20 nt, Artificial Sequence
  Description of Artificial Sequence: Synthetic oligonucleotide
gaauagcagagacuccggag

SEQ ID NO: 687 - RNA, 20 nt, Artificial Sequence
  Description of Artificial Sequence: Synthetic oligonucleotide
uuaccugaucccagugcuua

SEQ ID NO: 688 - RNA, 20 nt, Artificial Sequence
  Description of Artificial Sequence: Synthetic oligonucleotide
cuguggggcaccuggaaucg

SEQ ID NO: 689 - RNA, 20 nt, Artificial Sequence
  Description of Artificial Sequence: Synthetic oligonucleotide
cugucgggcccagccgaggu

SEQ ID NO: 690 - RNA, 20 nt, Artificial Sequence
  Description of Artificial Sequence: Synthetic oligonucleotide
agggccggccugaggcccug

SEQ ID NO: 691 - RNA, 20 nt, Artificial Sequence
  Description of Artificial Sequence: Synthetic oligonucleotide
cugcagauguuuuccacuca

SEQ ID NO: 692 - RNA, 20 nt, Artificial Sequence
  Description of Artificial Sequence: Synthetic oligonucleotide
gauguuaucugggaagaagg

SEQ ID NO: 693 - RNA, 20 nt, Artificial Sequence
  Description of Artificial Sequence: Synthetic oligonucleotide
gaaggcauuuaccuuuauag

SEQ ID NO: 694 - RNA, 20 nt, Artificial Sequence
  Description of Artificial Sequence: Synthetic oligonucleotide
cucugcuauuccaguuucca

SEQ ID NO: 695 - RNA, 20 nt, Artificial Sequence
  Description of Artificial Sequence: Synthetic oligonucleotide
gaagaagauagugaaaacuc

SEQ ID NO: 696 - RNA, 20 nt, Artificial Sequence
  Description of Artificial Sequence: Synthetic oligonucleotide
gccggcccuacugucgugcc

SEQ ID NO: 697 - RNA, 20 nt, Artificial Sequence
  Description of Artificial Sequence: Synthetic oligonucleotide
ggugguguuguguuuugauc

SEQ ID NO: 698 - RNA, 20 nt, Artificial Sequence
  Description of Artificial Sequence: Synthetic oligonucleotide
cuguauucaguuuaaugucu

SEQ ID NO: 699 - RNA, 20 nt, Artificial Sequence
  Description of Artificial Sequence: Synthetic oligonucleotide
gccugggucugcgaccccca

SEQ ID NO: 700 - RNA, 20 nt, Artificial Sequence
  Description of Artificial Sequence: Synthetic oligonucleotide
cuaguggcaggagaagcugc

SEQ ID NO: 701 - RNA, 20 nt, Artificial Sequence
  Description of Artificial Sequence: Synthetic oligonucleotide
gaacucggcaguaauaucuc

SEQ ID NO: 702 - RNA, 20 nt, Artificial Sequence
  Description of Artificial Sequence: Synthetic oligonucleotide
cuuucuucguuaggugugga

SEQ ID NO: 703 - RNA, 20 nt, Artificial Sequence
  Description of Artificial Sequence: Synthetic oligonucleotide
caggaacaccugguguggcc

SEQ ID NO: 704 - RNA, 20 nt, Artificial Sequence
  Description of Artificial Sequence: Synthetic oligonucleotide
ugcgucgcauuuauaaauaa

SEQ ID NO: 705 - RNA, 20 nt, Artificial Sequence
  Description of Artificial Sequence: Synthetic oligonucleotide
gcucgacaguuacaaaguuu

SEQ ID NO: 706 - RNA, 20 nt, Artificial Sequence
  Description of Artificial Sequence: Synthetic oligonucleotide
cgagauguuaucugggaaga

SEQ ID NO: 707 - RNA, 20 nt, Artificial Sequence
  Description of Artificial Sequence: Synthetic oligonucleotide
ggccaccucagacccguucu

SEQ ID NO: 708 - RNA, 20 nt, Artificial Sequence
  Description of Artificial Sequence: Synthetic oligonucleotide
cgaugccuggccauucucaa

SEQ ID NO: 709 - RNA, 20 nt, Artificial Sequence
  Description of Artificial Sequence: Synthetic oligonucleotide
auugaaagaacuucuuaaua

SEQ ID NO: 710 - RNA, 20 nt, Artificial Sequence
  Description of Artificial Sequence: Synthetic oligonucleotide
uaggagguccuuacuuggua

SEQ ID NO: 711 - RNA, 20 nt, Artificial Sequence
  Description of Artificial Sequence: Synthetic oligonucleotide
gccauggugguaacaggucu

SEQ ID NO: 712 - RNA, 20 nt, Artificial Sequence
  Description of Artificial Sequence: Synthetic oligonucleotide
ggaaacuauguagcugaucu

SEQ ID NO: 713 - RNA, 20 nt, Artificial Sequence
  Description of Artificial Sequence: Synthetic oligonucleotide
uuccucagguggggcuugag

SEQ ID NO: 714 - RNA, 20 nt, Artificial Sequence
  Description of Artificial Sequence: Synthetic oligonucleotide
cucgauuccaggugccccac

SEQ ID NO: 715 - RNA, 20 nt, Artificial Sequence
  Description of Artificial Sequence: Synthetic oligonucleotide
cgguuccgccaggcccccgg

SEQ ID NO: 716 - RNA, 20 nt, Artificial Sequence
  Description of Artificial Sequence: Synthetic oligonucleotide
accaaaaaucccuuugagaa

SEQ ID NO: 717 - RNA, 20 nt, Artificial Sequence
  Description of Artificial Sequence: Synthetic oligonucleotide
guucucuguacccuuccccu

SEQ ID NO: 718 - RNA, 20 nt, Artificial Sequence
  Description of Artificial Sequence: Synthetic oligonucleotide
gggccugucgggcccagccg

SEQ ID NO: 719 - RNA, 20 nt, Artificial Sequence
  Description of Artificial Sequence: Synthetic oligonucleotide
aagguaauuauuauaggcuc

SEQ ID NO: 720 - RNA, 20 nt, Artificial Sequence
  Description of Artificial Sequence: Synthetic oligonucleotide
ggucagcaaacaaguaaaua

SEQ ID NO: 721 - RNA, 20 nt, Artificial Sequence
  Description of Artificial Sequence: Synthetic oligonucleotide
cgagacaccacaguuucuuu

SEQ ID NO: 722 - RNA, 20 nt, Artificial Sequence
  Description of Artificial Sequence: Synthetic oligonucleotide
agaauugcagaccaguuuuu

SEQ ID NO: 723 - RNA, 20 nt, Artificial Sequence
  Description of Artificial Sequence: Synthetic oligonucleotide
auacucaucuucugagaggu

SEQ ID NO: 724 - RNA, 20 nt, Artificial Sequence
  Description of Artificial Sequence: Synthetic oligonucleotide
uguguuuugaucggguguuc

SEQ ID NO: 725 - RNA, 20 nt, Artificial Sequence
  Description of Artificial Sequence: Synthetic oligonucleotide
ggagagaguugagagaggug

SEQ ID NO: 726 - RNA, 20 nt, Artificial Sequence
  Description of Artificial Sequence: Synthetic oligonucleotide
gcuucagcacacccagggga

SEQ ID NO: 727 - RNA, 20 nt, Artificial Sequence
  Description of Artificial Sequence: Synthetic oligonucleotide
guaggagguccuuacuuggu

SEQ ID NO: 728 - RNA, 20 nt, Artificial Sequence
  Description of Artificial Sequence: Synthetic oligonucleotide
gucggaccagccggcgcaag

SEQ ID NO: 729 - RNA, 20 nt, Artificial Sequence
  Description of Artificial Sequence: Synthetic oligonucleotide
uuggcaguacgacugccagc

SEQ ID NO: 730 - RNA, 20 nt, Artificial Sequence
  Description of Artificial Sequence: Synthetic oligonucleotide
agaagaaaaacuucaggagu

SEQ ID NO: 731 - RNA, 20 nt, Artificial Sequence
  Description of Artificial Sequence: Synthetic oligonucleotide
gcuggcccugggacagcagg

SEQ ID NO: 732 - RNA, 20 nt, Artificial Sequence
  Description of Artificial Sequence: Synthetic oligonucleotide
cagagagauggaugaaagcu

SEQ ID NO: 733 - RNA, 20 nt, Artificial Sequence
  Description of Artificial Sequence: Synthetic oligonucleotide
uuaagggagagaguugagag

SEQ ID NO: 734 - RNA, 20 nt, Artificial Sequence
  Description of Artificial Sequence: Synthetic oligonucleotide
gggggccuggcggaaccgcc

SEQ ID NO: 735 - RNA, 20 nt, Artificial Sequence
  Description of Artificial Sequence: Synthetic oligonucleotide
uaccugaucccagugcuuaa

SEQ ID NO: 736 - RNA, 20 nt, Artificial Sequence
  Description of Artificial Sequence: Synthetic oligonucleotide
ugggaagaaggcggcagccg

SEQ ID NO: 737 - RNA, 20 nt, Artificial Sequence
  Description of Artificial Sequence: Synthetic oligonucleotide
ugucacacuuuuggaagcca

SEQ ID NO: 738 - RNA, 20 nt, Artificial Sequence
  Description of Artificial Sequence: Synthetic oligonucleotide
gcugggcccgacaggcccgc

SEQ ID NO: 739 - RNA, 20 nt, Artificial Sequence
  Description of Artificial Sequence: Synthetic oligonucleotide
cucuucuggaaccucuauaa

SEQ ID NO: 740 - RNA, 20 nt, Artificial Sequence
  Description of Artificial Sequence: Synthetic oligonucleotide
acugauaauaucuggaaaac

SEQ ID NO: 741 - RNA, 20 nt, Artificial Sequence
  Description of Artificial Sequence: Synthetic oligonucleotide
cggaggggcgucggaccagc

SEQ ID NO: 742 - RNA, 20 nt, Artificial Sequence
  Description of Artificial Sequence: Synthetic oligonucleotide
cuuugagaauggccaggcau

SEQ ID NO: 743 - RNA, 20 nt, Artificial Sequence
  Description of Artificial Sequence: Synthetic oligonucleotide
gcgcagcccgcgggccuguc

SEQ ID NO: 744 - RNA, 20 nt, Artificial Sequence
  Description of Artificial Sequence: Synthetic oligonucleotide
auuccacgacucuucuuugc

SEQ ID NO: 745 - RNA, 20 nt, Artificial Sequence
  Description of Artificial Sequence: Synthetic oligonucleotide
augcuucuuuguauugcuga

SEQ ID NO: 746 - RNA, 20 nt, Artificial Sequence
  Description of Artificial Sequence: Synthetic oligonucleotide
aagaauugcagaccaguuuu

SEQ ID NO: 747 - RNA, 20 nt, Artificial Sequence
  Description of Artificial Sequence: Synthetic oligonucleotide
cugugcaggaacaccuggug

SEQ ID NO: 748 - RNA, 20 nt, Artificial Sequence
  Description of Artificial Sequence: Synthetic oligonucleotide
ggaauaagagccccgagccc

SEQ ID NO: 749 - RNA, 20 nt, Artificial Sequence
  Description of Artificial Sequence: Synthetic oligonucleotide
cugccucgccaggccacacc

SEQ ID NO: 750 - RNA, 20 nt, Artificial Sequence
  Description of Artificial Sequence: Synthetic oligonucleotide
ccgggacggaggcuggcccu

SEQ ID NO: 751 - RNA, 20 nt, Artificial Sequence
  Description of Artificial Sequence: Synthetic oligonucleotide
cagagacuccggaggggcgu

SEQ ID NO: 752 - RNA, 20 nt, Artificial Sequence
  Description of Artificial Sequence: Synthetic oligonucleotide
cggagccgccugcuguccca

SEQ ID NO: 753 - RNA, 20 nt, Artificial Sequence
  Description of Artificial Sequence: Synthetic oligonucleotide
gugcauggugcucugcugag

SEQ ID NO: 754 - RNA, 20 nt, Artificial Sequence
  Description of Artificial Sequence: Synthetic oligonucleotide
cugcugcuucagcacaccca

SEQ ID NO: 755 - RNA, 20 nt, Artificial Sequence
  Description of Artificial Sequence: Synthetic oligonucleotide
acaggaaagguaauuauuau

SEQ ID NO: 756 - RNA, 20 nt, Artificial Sequence
  Description of Artificial Sequence: Synthetic oligonucleotide
cagccggcgcaagcgggcga

SEQ ID NO: 757 - RNA, 20 nt, Artificial Sequence
  Description of Artificial Sequence: Synthetic oligonucleotide
ugcauggugcucugcugagu

SEQ ID NO: 758 - RNA, 20 nt, Artificial Sequence
  Description of Artificial Sequence: Synthetic oligonucleotide
gcugcugcuucagcacaccc

SEQ ID NO: 759 - RNA, 20 nt, Artificial Sequence
  Description of Artificial Sequence: Synthetic oligonucleotide
ugucgggcccagccgagguc

SEQ ID NO: 760 - RNA, 20 nt, Artificial Sequence
  Description of Artificial Sequence: Synthetic oligonucleotide
cgugcugaucccugggcucg

SEQ ID NO: 761 - RNA, 20 nt, Artificial Sequence
  Description of Artificial Sequence: Synthetic oligonucleotide
gcgguuccgccaggcccccg

SEQ ID NO: 762 - RNA, 20 nt, Artificial Sequence
  Description of Artificial Sequence: Synthetic oligonucleotide
gcaguccaaaggaugggauu

SEQ ID NO: 763 - RNA, 20 nt, Artificial Sequence
  Description of Artificial Sequence: Synthetic oligonucleotide
acacacuacuuacuguuaua

SEQ ID NO: 764 - RNA, 20 nt, Artificial Sequence
  Description of Artificial Sequence: Synthetic oligonucleotide
uaagccugugucccuuggcc

SEQ ID NO: 765 - RNA, 20 nt, Artificial Sequence
  Description of Artificial Sequence: Synthetic oligonucleotide
ggcccagccgaggucgggcc

SEQ ID NO: 766 - RNA, 20 nt, Artificial Sequence
  Description of Artificial Sequence: Synthetic oligonucleotide
acaccugguguggccuggcg

SEQ ID NO: 767 - RNA, 20 nt, Artificial Sequence
  Description of Artificial Sequence: Synthetic oligonucleotide
gauccaagugucaauuuguu

SEQ ID NO: 768 - RNA, 20 nt, Artificial Sequence
  Description of Artificial Sequence: Synthetic oligonucleotide
ucaaaugucagcugaaucuu

SEQ ID NO: 769 - RNA, 20 nt, Artificial Sequence
  Description of Artificial Sequence: Synthetic oligonucleotide
gggcccagccgaggucgggc

SEQ ID NO: 770 - RNA, 20 nt, Artificial Sequence
  Description of Artificial Sequence: Synthetic oligonucleotide
cgacaggcccgcgggcugcg

SEQ ID NO: 771 - RNA, 20 nt, Artificial Sequence
  Description of Artificial Sequence: Synthetic oligonucleotide
ggucaugaggaagucggcuc

SEQ ID NO: 772 - RNA, 20 nt, Artificial Sequence
  Description of Artificial Sequence: Synthetic oligonucleotide
uccgcgggccucgccccccg

SEQ ID NO: 773 - RNA, 20 nt, Artificial Sequence
  Description of Artificial Sequence: Synthetic oligonucleotide
cucguuggcgugcugauccc

SEQ ID NO: 774 - RNA, 20 nt, Artificial Sequence
  Description of Artificial Sequence: Synthetic oligonucleotide
acgagacaccacaguuucuu

SEQ ID NO: 775 - RNA, 20 nt, Artificial Sequence
  Description of Artificial Sequence: Synthetic oligonucleotide
ugugucccuuggccaggcau

SEQ ID NO: 776 - RNA, 20 nt, Artificial Sequence
  Description of Artificial Sequence: Synthetic oligonucleotide
cggcugcagcggcagcaacc

SEQ ID NO: 777 - RNA, 20 nt, Artificial Sequence
  Description of Artificial Sequence: Synthetic oligonucleotide
gaggaagagcucaccccugc

SEQ ID NO: 778 - RNA, 20 nt, Artificial Sequence
  Description of Artificial Sequence: Synthetic oligonucleotide
aguucucuguacccuucccc

SEQ ID NO: 779 - RNA, 20 nt, Artificial Sequence
  Description of Artificial Sequence: Synthetic oligonucleotide
ccgcggaggcucuuucuugc

SEQ ID NO: 780 - RNA, 20 nt, Artificial Sequence
  Description of Artificial Sequence: Synthetic oligonucleotide
gagaaaugccaaagcagaga

SEQ ID NO: 781 - RNA, 20 nt, Artificial Sequence
  Description of Artificial Sequence: Synthetic oligonucleotide
cccccggcccgaccucggcu

SEQ ID NO: 782 - RNA, 20 nt, Artificial Sequence
  Description of Artificial Sequence: Synthetic oligonucleotide
gaagaaggcggcagccgcgg

SEQ ID NO: 783 - RNA, 20 nt, Artificial Sequence
  Description of Artificial Sequence: Synthetic oligonucleotide
ggcugggcccgacaggcccg

SEQ ID NO: 784 - RNA, 20 nt, Artificial Sequence
  Description of Artificial Sequence: Synthetic oligonucleotide
ucugcgacccccauggaaac

SEQ ID NO: 785 - RNA, 20 nt, Artificial Sequence
  Description of Artificial Sequence: Synthetic oligonucleotide
gccugaggcccugcggaccc

SEQ ID NO: 786 - RNA, 20 nt, Artificial Sequence
  Description of Artificial Sequence: Synthetic oligonucleotide
aggugguguuguguuuugau

SEQ ID NO: 787 - RNA, 20 nt, Artificial Sequence
  Description of Artificial Sequence: Synthetic oligonucleotide
uucauuuucuuccucaggug

SEQ ID NO: 788 - RNA, 20 nt, Artificial Sequence
  Description of Artificial Sequence: Synthetic oligonucleotide
uuaccuucgcccgcuugcgc

SEQ ID NO: 789 - RNA, 20 nt, Artificial Sequence
  Description of Artificial Sequence: Synthetic oligonucleotide
gcccagccgaggucgggccg

SEQ ID NO: 790 - RNA, 20 nt, Artificial Sequence
  Description of Artificial Sequence: Synthetic oligonucleotide
ccggggggcgaggcccgcgg

SEQ ID NO: 791 - RNA, 20 nt, Artificial Sequence
  Description of Artificial Sequence: Synthetic oligonucleotide
cccagggccagccuccgucc

SEQ ID NO: 792 - RNA, 20 nt, Artificial Sequence
  Description of Artificial Sequence: Synthetic oligonucleotide
ucuuccucagguggggcuug

SEQ ID NO: 793 - RNA, 20 nt, Artificial Sequence
  Description of Artificial Sequence: Synthetic oligonucleotide
cgaccucggcugggcccgac

SEQ ID NO: 794 - RNA, 20 nt, Artificial Sequence
  Description of Artificial Sequence: Synthetic oligonucleotide
cuucuucccagauaacaucu

SEQ ID NO: 795 - RNA, 20 nt, Artificial Sequence
  Description of Artificial Sequence: Synthetic oligonucleotide
uauguugcugcaggaucauc

SEQ ID NO: 796 - RNA, 20 nt, Artificial Sequence
  Description of Artificial Sequence: Synthetic oligonucleotide
cucgccccccgggggccugg

SEQ ID NO: 797 - RNA, 20 nt, Artificial Sequence
  Description of Artificial Sequence: Synthetic oligonucleotide
gccauucucaaagggauuuu

SEQ ID NO: 798 - RNA, 20 nt, Artificial Sequence
  Description of Artificial Sequence: Synthetic oligonucleotide
ggcgugcugaucccugggcu

SEQ ID NO: 799 - RNA, 20 nt, Artificial Sequence
  Description of Artificial Sequence: Synthetic oligonucleotide
gagacagacaaauacuugau

SEQ ID NO: 800 - RNA, 20 nt, Artificial Sequence
  Description of Artificial Sequence: Synthetic oligonucleotide
ggguccgcagggccucaggc

SEQ ID NO: 801 - RNA, 20 nt, Artificial Sequence
  Description of Artificial Sequence: Synthetic oligonucleotide
acuccuggccccucgauucc

SEQ ID NO: 802 - RNA, 20 nt, Artificial Sequence
  Description of Artificial Sequence: Synthetic oligonucleotide
cgcgcagcccgcgggccugu

SEQ ID NO: 803 - RNA, 20 nt, Artificial Sequence
  Description of Artificial Sequence: Synthetic oligonucleotide
cuuucauuuucuuccucagg

SEQ ID NO: 804 - RNA, 20 nt, Artificial Sequence
  Description of Artificial Sequence: Synthetic oligonucleotide
gugcgcucccccaccgcccc

SEQ ID NO: 805 - RNA, 20 nt, Artificial Sequence
  Description of Artificial Sequence: Synthetic oligonucleotide
gaggcuggcccugggacagc

SEQ ID NO: 806 - RNA, 20 nt, Artificial Sequence
  Description of Artificial Sequence: Synthetic oligonucleotide
uuucauuuucuuccucaggu

SEQ ID NO: 807 - RNA, 20 nt, Artificial Sequence
  Description of Artificial Sequence: Synthetic oligonucleotide
cggcugguccgacgccccuc

SEQ ID NO: 808 - RNA, 20 nt, Artificial Sequence
  Description of Artificial Sequence: Synthetic oligonucleotide
aucgaggggccaggagugau

SEQ ID NO: 809 - RNA, 20 nt, Artificial Sequence
  Description of Artificial Sequence: Synthetic oligonucleotide
gagguggccgcgcagcccgc

SEQ ID NO: 810 - RNA, 20 nt, Artificial Sequence
  Description of Artificial Sequence: Synthetic oligonucleotide
cgggggccuggcggaaccgc

SEQ ID NO: 811 - RNA, 20 nt, Artificial Sequence
  Description of Artificial Sequence: Synthetic oligonucleotide
cgcugcagccgccgccgccg

SEQ ID NO: 812 - RNA, 20 nt, Artificial Sequence
  Description of Artificial Sequence: Synthetic oligonucleotide
cuucucaccuguggggcacc

SEQ ID NO: 813 - RNA, 20 nt, Artificial Sequence
  Description of Artificial Sequence: Synthetic oligonucleotide
aggucgggccgggggcggug

SEQ ID NO: 814 - RNA, 20 nt, Artificial Sequence
  Description of Artificial Sequence: Synthetic oligonucleotide
agagcaccaugcacuguggc

SEQ ID NO: 815 - RNA, 20 nt, Artificial Sequence
  Description of Artificial Sequence: Synthetic oligonucleotide
gacugcugugcaggaacacc

SEQ ID NO: 816 - RNA, 20 nt, Artificial Sequence
  Description of Artificial Sequence: Synthetic oligonucleotide
aggcucuggggucucaggcu

SEQ ID NO: 817 - RNA, 20 nt, Artificial Sequence
  Description of Artificial Sequence: Synthetic oligonucleotide
cccagccgaggucgggccgg

SEQ ID NO: 818 - RNA, 20 nt, Artificial Sequence
  Description of Artificial Sequence: Synthetic oligonucleotide
ugagguggccgcgcagcccg

SEQ ID NO: 819 - RNA, 20 nt, Artificial Sequence
  Description of Artificial Sequence: Synthetic oligonucleotide
gcgugcugaucccugggcuc

SEQ ID NO: 820 - RNA, 20 nt, Artificial Sequence
  Description of Artificial Sequence: Synthetic oligonucleotide
gcaccuggaaucgaggggcc

SEQ ID NO: 821 - RNA, 20 nt, Artificial Sequence
  Description of Artificial Sequence: Synthetic oligonucleotide
cuucgcccgcuugcgccggc

SEQ ID NO: 822 - RNA, 20 nt, Artificial Sequence
  Description of Artificial Sequence: Synthetic oligonucleotide
uccuaaagagaaagaugaaa

SEQ ID NO: 823 - RNA, 20 nt, Artificial Sequence
  Description of Artificial Sequence: Synthetic oligonucleotide
augcuuggggacugcugugc

SEQ ID NO: 824 - RNA, 20 nt, Artificial Sequence
  Description of Artificial Sequence: Synthetic oligonucleotide
aaugaaaagaaaaaccuucu

SEQ ID NO: 825 - RNA, 20 nt, Artificial Sequence
  Description of Artificial Sequence: Synthetic oligonucleotide
gcggaaccgccgggguccgc

SEQ ID NO: 826 - RNA, 20 nt, Artificial Sequence
  Description of Artificial Sequence: Synthetic oligonucleotide
gaggucgggccgggggcggu

SEQ ID NO: 827 - RNA, 20 nt, Artificial Sequence
  Description of Artificial Sequence: Synthetic oligonucleotide
auuauaggcucuggggucuc

SEQ ID NO: 828 - RNA, 20 nt, Artificial Sequence
  Description of Artificial Sequence: Synthetic oligonucleotide
ucacuuucauuuucuuccuc

SEQ ID NO: 829 - RNA, 20 nt, Artificial Sequence
  Description of Artificial Sequence: Synthetic oligonucleotide
ucggagccgccugcuguccc

SEQ ID NO: 830 - RNA, 20 nt, Artificial Sequence
  Description of Artificial Sequence: Synthetic oligonucleotide
agccgaggucgggccggggg

SEQ ID NO: 831 - RNA, 20 nt, Artificial Sequence
  Description of Artificial Sequence: Synthetic oligonucleotide
aaagcuagaagaaaaacuuc

SEQ ID NO: 832 - RNA, 20 nt, Artificial Sequence
  Description of Artificial Sequence: Synthetic oligonucleotide
uccucagguggggcuugagg

SEQ ID NO: 833 - RNA, 20 nt, Artificial Sequence
  Description of Artificial Sequence: Synthetic oligonucleotide
ugcaucugucucacaugcuu

SEQ ID NO: 834 - RNA, 20 nt, Artificial Sequence
  Description of Artificial Sequence: Synthetic oligonucleotide
ggcgguuccgccaggccccc

SEQ ID NO: 835 - RNA, 20 nt, Artificial Sequence
  Description of Artificial Sequence: Synthetic oligonucleotide
cggcgguuccgccaggcccc

SEQ ID NO: 836 - RNA, 20 nt, Artificial Sequence
  Description of Artificial Sequence: Synthetic oligonucleotide
accgggacggaggcuggccc

SEQ ID NO: 837 - RNA, 20 nt, Artificial Sequence
  Description of Artificial Sequence: Synthetic oligonucleotide
caccgcccccggcccgaccu

SEQ ID NO: 838 - RNA, 20 nt, Artificial Sequence
  Description of Artificial Sequence: Synthetic oligonucleotide
ggggugagcucuuccucuuc

SEQ ID NO: 839 - RNA, 20 nt, Artificial Sequence
  Description of Artificial Sequence: Synthetic oligonucleotide
cgccaggcccccggggggcg

SEQ ID NO: 840 - RNA, 20 nt, Artificial Sequence
  Description of Artificial Sequence: Synthetic oligonucleotide
accauuucaucuuucucuuu

SEQ ID NO: 841 - RNA, 20 nt, Artificial Sequence
  Description of Artificial Sequence: Synthetic oligonucleotide
ggccucgccccccgggggcc

SEQ ID NO: 842 - RNA, 20 nt, Artificial Sequence
  Description of Artificial Sequence: Synthetic oligonucleotide
uggggcuugaggggguggug

SEQ ID NO: 843 - RNA, 20 nt, Artificial Sequence
  Description of Artificial Sequence: Synthetic oligonucleotide
gccgggguccgcagggccuc

SEQ ID NO: 844 - RNA, 20 nt, Artificial Sequence
  Description of Artificial Sequence: Synthetic oligonucleotide
gcccccggcccgaccucggc

SEQ ID NO: 845 - RNA, 20 nt, Artificial Sequence
  Description of Artificial Sequence: Synthetic oligonucleotide
cuucuuuuccuucucugcuu

SEQ ID NO: 846 - RNA, 20 nt, Artificial Sequence
  Description of Artificial Sequence: Synthetic oligonucleotide
ccuccgcgggccucgccccc

SEQ ID NO: 847 - RNA, 20 nt, Artificial Sequence
  Description of Artificial Sequence: Synthetic oligonucleotide
ggucgggccgggggcggugg

SEQ ID NO: 848 - RNA, 20 nt, Artificial Sequence
  Description of Artificial Sequence: Synthetic oligonucleotide
cuccgcgggccucgcccccc

SEQ ID NO: 849 - RNA, 20 nt, Artificial Sequence
  Description of Artificial Sequence: Synthetic oligonucleotide
uggaauggaugucacacuuu

SEQ ID NO: 850 - RNA, 20 nt, Artificial Sequence
  Description of Artificial Sequence: Synthetic oligonucleotide
cuuccucagguggggcuuga

SEQ ID NO: 851 - RNA, 20 nt, Artificial Sequence
  Description of Artificial Sequence: Synthetic oligonucleotide
guggggcuugaggggguggu

SEQ ID NO: 852 - RNA, 20 nt, Artificial Sequence
  Description of Artificial Sequence: Synthetic oligonucleotide
gcggcugcagcggcagcaac

SEQ ID NO: 853 - RNA, 20 nt, Artificial Sequence
  Description of Artificial Sequence: Synthetic oligonucleotide
cccccggggggcgaggcccg

SEQ ID NO: 854 - RNA, 20 nt, Artificial Sequence
  Description of Artificial Sequence: Synthetic oligonucleotide
uaaugaaaagaaaaaccuuc

SEQ ID NO: 855 - RNA, 20 nt, Artificial Sequence
  Description of Artificial Sequence: Synthetic oligonucleotide
cgcggcggcggcggcugcag

SEQ ID NO: 856 - RNA, 20 nt, Artificial Sequence
  Description of Artificial Sequence: Synthetic oligonucleotide
ucagguggggcuugaggggg

SEQ ID NO: 857 - RNA, 20 nt, Artificial Sequence
  Description of Artificial Sequence: Synthetic oligonucleotide
gguggggcuugagggggugg

SEQ ID NO: 858 - RNA, 20 nt, Artificial Sequence
  Description of Artificial Sequence: Synthetic oligonucleotide
uggaaaugacuaugauuuaa

SEQ ID NO: 859 - RNA, 20 nt, Artificial Sequence
  Description of Artificial Sequence: Synthetic oligonucleotide
ggggcuugaggggguggugg

SEQ ID NO: 860 - RNA, 20 nt, Artificial Sequence
  Description of Artificial Sequence: Synthetic oligonucleotide
cgaggucgggccgggggcgg

SEQ ID NO: 861 - RNA, 20 nt, Artificial Sequence
  Description of Artificial Sequence: Synthetic oligonucleotide
ggcggcagccgcggcggcgg

SEQ ID NO: 862 - RNA, 20 nt, Artificial Sequence
  Description of Artificial Sequence: Synthetic oligonucleotide
gaaggcggcagccgcggcgg

SEQ ID NO: 863 - DNA, 27 bp, Artificial Sequence
  Description of Artificial Sequence: Synthetic oligonucleotide
  modified_base (1)..(20): a, c, t or g
  modified_base (21)..(22): a, c, t, g, unknown or other
nnnnnnnnnnnnnnnnnnnnnnagaaw

SEQ ID NO: 864 - protein, 7 aa, Simian virus 40
PKKKRKV

SEQ ID NO: 865 - protein, 6 aa, Artificial Sequence
  Description of Artificial Sequence: Synthetic 6xHis tag
HHHHHH

SEQ ID NO: 866 - protein, 8 aa, Artificial Sequence
  Description of Artificial Sequence: Synthetic 8xHis tag
HHHHHHHH

SEQ ID NO: 867 - RNA, 42 nt, Artificial Sequence
  Description of Artificial Sequence: Synthetic oligonucleotide
  modified_base (1)..(20): a, c, u, g, unknown or other
nnnnnnnnnnnnnnnnnnnnguuuuagagcuaugcuguuuug

SEQ ID NO: 868 - RNA, 86 nt, Artificial Sequence
  Description of Artificial Sequence: Synthetic oligonucleotide
  misc_feature (80)..(86): May or may not be present
aacuuaccaaggaacagcauagcaaguuaaaauaaggcuaguccguuaucaacuugaaaaaguggcaccgagucggugcuuuuuuu

SEQ ID NO: 869 - RNA, 74 nt, Artificial Sequence
  Description of Artificial Sequence: Synthetic oligonucleotide
  misc_feature (68)..(74): May or may not be present
aacagcauagcaaguuaaaauaaggcuaguccguuaucaacuugaaaaaguggcaccgagucggugcuuuuuuu

SEQ ID NO: 870 - RNA, 102 nt, Artificial Sequence
  Description of Artificial Sequence: Synthetic polynucleotide
  modified_base (1)..(19): a, c, u, g, unknown or other
  misc_feature (96)..(102): May or may not be present
nnnnnnnnnnnnnnnnnnnguuuuagagcuagaaauagcaaguuaaaauaaggcuaguccguuaucaacuugaaaaaguggcaccgagucggugcuuuuuuu

SEQ ID NO: 871 - protein, 18 aa, Artificial Sequence
  Description of Artificial Sequence: Synthetic peptide
GSTSGSGKPGSGEGSTKG

SEQ ID NO: 872 - protein, 242 aa, Artificial Sequence
  Description of Artificial Sequence: Synthetic polypeptide
EIVMTQSPATLSLSPGERATLSCRASQDISKYLNWYQQKPGQAPRLLIYHTSRLHSGIPARFSGSGSGTDYTLTISSLQPEDFAVYFCQQGNTLPYTFGQGTKLEIKGGGGSGGGGSGGGGSQVQLQESGPGLVKPSETLSLTCTVSGVSLPDYGVSWIRQPPGKGLEWIGVIWGSETTYYSSSLKSRVTISKDNSKNQVSLKLSSVTAADTAVYYCAKHYYYGGSYAMDYWGQGTLVTVSS

SEQ ID NO: 873 - protein, 242 aa, Artificial Sequence
  Description of Artificial Sequence: Synthetic polypeptide
EIVMTQSPATLSLSPGERATLSCRASQDISKYLNWYQQKPGQAPRLLIYHTSRLHSGIPARFSGSGSGTDYTLTISSLQPEDFAVYFCQQGNTLPYTFGQGTKLEIKGGGGSGGGGSGGGGSQVQLQESGPGLVKPSETLSLTCTVSGVSLPDYGVSWIRQPPGKGLEWIGVIWGSETTYYQSSLKSRVTISKDNSKNQVSLKLSSVTAADTAVYYCAKHYYYGGSYAMDYWGQGTLVTVSS

SEQ ID NO: 874 - protein, 242 aa, Artificial Sequence
  Description of Artificial Sequence: Synthetic polypeptide
QVQLQESGPGLVKPSETLSLTCTVSGVSLPDYGVSWIRQPPGKGLEWIGVIWGSETTYYSSSLKSRVTISKDNSKNQVSLKLSSVTAADTAVYYCAKHYYYGGSYAMDYWGQGTLVTVSSGGGGSGGGGSGGGGSEIVMTQSPATLSLSPGERATLSCRASQDISKYLNWYQQKPGQAPRLLIYHTSRLHSGIPARFSGSGSGTDYTLTISSLQPEDFAVYFCQQGNTLPYTFGQGTKLEIK

SEQ ID NO: 875 - protein, 242 aa, Artificial Sequence
  Description of Artificial Sequence: Synthetic polypeptide
QVQLQESGPGLVKPSETLSLTCTVSGVSLPDYGVSWIRQPPGKGLEWIGVIWGSETTYYQSSLKSRVTISKDNSKNQVSLKLSSVTAADTAVYYCAKHYYYGGSYAMDYWGQGTLVTVSSGGGGSGGGGSGGGGSEIVMTQSPATLSLSPGERATLSCRASQDISKYLNWYQQKPGQAPRLLIYHTSRLHSGIPARFSGSGSGTDYTLTISSLQPEDFAVYFCQQGNTLPYTFGQGTKLEIK

SEQ ID NO: 876 - protein, 247 aa, Artificial Sequence
  Description of Artificial Sequence: Synthetic polypeptide
EIVMTQSPATLSLSPGERATLSCRASQDISKYLNWYQQKPGQAPRLLIYHTSRLHSGIPARFSGSGSGTDYTLTISSLQPEDFAVYFCQQGNTLPYTFGQGTKLEIKGGGGSGGGGSGGGGSGGGGSQVQLQESGPGLVKPSETLSLTCTVSGVSLPDYGVSWIRQPPGKGLEWIGVIWGSETTYYSSSLKSRVTISKDNSKNQVSLKLSSVTAADTAVYYCAKHYYYGGSYAMDYWGQGTLVTVSS

SEQ ID NO: 877 - protein, 247 aa, Artificial Sequence
  Description of Artificial Sequence: Synthetic polypeptide
EIVMTQSPATLSLSPGERATLSCRASQDISKYLNWYQQKPGQAPRLLIYHTSRLHSGIPARFSGSGSGTDYTLTISSLQPEDFAVYFCQQGNTLPYTFGQGTKLEIKGGGGSGGGGSGGGGSGGGGSQVQLQESGPGLVKPSETLSLTCTVSGVSLPDYGVSWIRQPPGKGLEWIGVIWGSETTYYQSSLKSRVTISKDNSKNQVSLKLSSVTAADTAVYYCAKHYYYGGSYAMDYWGQGTLVTVSS

SEQ ID NO: 878 - protein, 247 aa, Artificial Sequence
  Description of Artificial Sequence: Synthetic polypeptide
QVQLQESGPGLVKPSETLSLTCTVSGVSLPDYGVSWIRQPPGKGLEWIGVIWGSETTYYSSSLKSRVTISKDNSKNQVSLKLSSVTAADTAVYYCAKHYYYGGSYAMDYWGQGTLVTVSSGGGGSGGGGSGGGGSGGGGSEIVMTQSPATLSLSPGERATLSCRASQDISKYLNWYQQKPGQAPRLLIYHTSRLHSGIPARFSGSGSGTDYTLTISSLQPEDFAVYFCQQGNTLPYTFGQGTKLEIK

SEQ ID NO: 879 - protein, 247 aa, Artificial Sequence
  Description of Artificial Sequence: Synthetic polypeptide
QVQLQESGPGLVKPSETLSLTCTVSGVSLPDYGVSWIRQPPGKGLEWIGVIWGSETTYYQSSLKSRVTISKDNSKNQVSLKLSSVTAADTAVYYCAKHYYYGGSYAMDYWGQGTLVTVSSGGGGSGGGGSGGGGSGGGGSEIVMTQSPATLSLSPGERATLSCRASQDISKYLNWYQQKPGQAPRLLIYHTSRLHSGIPARFSGSGSGTDYTLTISSLQPEDFAVYFCQQGNTLPYTFGQGTKLEIK

SEQ ID NO: 880 - protein, 247 aa, Artificial Sequence
  Description of Artificial Sequence: Synthetic polypeptide
EIVMTQSPATLSLSPGERATLSCRASQDISKYLNWYQQKPGQAPRLLIYHTSRLHSGIPARFSGSGSGTDYTLTISSLQPEDFAVYFCQQGNTLPYTFGQGTKLEIKGGGGSGGGGSGGGGSGGGGSQVQLQESGPGLVKPSETLSLTCTVSGVSLPDYGVSWIRQPPGKGLEWIGVIWGSETTYYNSSLKSRVTISKDNSKNQVSLKLSSVTAADTAVYYCAKHYYYGGSYAMDYWGQGTLVTVSS

SEQ ID NO: 881 - protein, 247 aa, Artificial Sequence
  Description of Artificial Sequence: Synthetic polypeptide
QVQLQESGPGLVKPSETLSLTCTVSGVSLPDYGVSWIRQPPGKGLEWIGVIWGSETTYYNSSLKSRVTISKDNSKNQVSLKLSSVTAADTAVYYCAKHYYYGGSYAMDYWGQGTLVTVSSGGGGSGGGGSGGGGSGGGGSEIVMTQSPATLSLSPGERATLSCRASQDISKYLNWYQQKPGQAPRLLIYHTSRLHSGIPARFSGSGSGTDYTLTISSLQPEDFAVYFCQQGNTLPYTFGQGTKLEIK

SEQ ID NO: 882 - protein, 242 aa, Artificial Sequence
  Description of Artificial Sequence: Synthetic polypeptide
EIVMTQSPATLSLSPGERATLSCRASQDISKYLNWYQQKPGQAPRLLIYHTSRLHSGIPARFSGSGSGTDYTLTISSLQPEDFAVYFCQQGNTLPYTFGQGTKLEIKGGGGSGGGGSGGGGSQVQLQESGPGLVKPSETLSLTCTVSGVSLPDYGVSWIRQPPGKGLEWIGVIWGSETTYYNSSLKSRVTISKDNSKNQVSLKLSSVTAADTAVYYCAKHYYYGGSYAMDYWGQGTLVTVSS

SEQ ID NO: 883 - protein, 242 aa, Artificial Sequence
  Description of Artificial Sequence: Synthetic polypeptide
QVQLQESGPGLVKPSETLSLTCTVSGVSLPDYGVSWIRQPPGKGLEWIGVIWGSETTYYNSSLKSRVTISKDNSKNQVSLKLSSVTAADTAVYYCAKHYYYGGSYAMDYWGQGTLVTVSSGGGGSGGGGSGGGGSEIVMTQSPATLSLSPGERATLSCRASQDISKYLNWYQQKPGQAPRLLIYHTSRLHSGIPARFSGSGSGTDYTLTISSLQPEDFAVYFCQQGNTLPYTFGQGTKLEIK

SEQ ID NO: 884 - protein, 242 aa, Artificial Sequence
  Description of Artificial Sequence: Synthetic polypeptide
DIQMTQTTSSLSASLGDRVTISCRASQDISKYLNWYQQKPDGTVKLLIYHTSRLHSGVPSRFSGSGSGTDYSLTISNLEQEDIATYFCQQGNTLPYTFGGGTKLEITGGGGSGGGGSGGGGSEVKLQESGPGLVAPSQSLSVTCTVSGVSLPDYGVSWIRQPPRKGLEWLGVIWGSETTYYNSALKSRLTIIKDNSKSQVFLKMNSLQTDDTAIYYCAKHYYYGGSYAMDYWGQGTSVTVSS

SEQ ID NO: 885 - protein, 119 aa, Artificial Sequence
  Description of Artificial Sequence: Synthetic polypeptide
QVQLLESGAELVRPGSSVKISCKASGYAFSSYWMNWVKQRPGQGLEWIGQIYPGDGDTNYNGKFKGQATLTADKSSSTAYMQLSGLTSEDSAVYSCARKTISSVVDFYFDYWGQGTTVT

SEQ ID NO: 886 - protein, 111 aa, Artificial Sequence
  Description of Artificial Sequence: Synthetic polypeptide
ELVLTQSPKFMSTSVGDRVSVTCKASQNVGTNVAWYQQKPGQSPKPLIYSATYRNSGVPDRFTGSGSGTDFTLTITNVQSKDLADYFYFCQYNRYPYTSGGGTKLEIKRRS

SEQ ID NO: 887 - protein, 244 aa, Artificial Sequence
  Description of Artificial Sequence: Synthetic polypeptide
QVQLLESGAELVRPGSSVKISCKASGYAFSSYWMNWVKQRPGQGLEWIGQIYPGDGDTNYNGKFKGQATLTADKSSSTAYMQLSGLTSEDSAVYSCARKTISSVVDFYFDYWGQGTTVTGGGSGGGSGGGSGGGSELVLTQSPKFMSTSVGDRVSVTCKASQNVGTNVAWYQQKPGQSPKPLIYSATYRNSGVPDRFTGSGSGTDFTLTITNVQSKDLADYFCQYNRYPYTSFFFTKLEIKRRS

SEQ ID NO: 888 - protein, 246 aa, Artificial Sequence
  Description of Artificial Sequence: Synthetic polypeptide
DIQMTQTTSSLSASLGDRVTISCRASQDISKYLNWYQQKPDGTVKLLIYHTSRLHSGVPSRFSGSGSGTDYSLTISNLEQEDIATYFCQQGNTLPYTFGGGTKLEITGSTSGSGKPGSGEGSTKGEVKLQESGPGLVAPSQSLSVTCTVSGVSLPDYGVSWIRQPPRKGLEWLGVIWGSETTYYNSALKSRLTIIKDNSKSQVFLKMNSLQTDDTAIYYCAKHYYYGGSYAMDYWGQGTSVTVSSE

SEQ ID NO: 889 - protein, 245 aa, Artificial Sequence
  Description of Artificial Sequence: Synthetic polypeptide
DIQMTQTTSSLSASLGDRVTISCRASQDISKYLNWYQQKPDGTVKLLIYHTSRLHSGVPSRFSGSGSGTDYSLTISNLEQEDIATYFCQQGNTLPYTFGGGTKLEITGSTSGSGKPGSGEGSTKGEVKLQESGPGLVAPSQSLSVTCTVSGVSLPDYGVSWIRQPPRKGLEWLGVIWGSETTYYNSALKSRLTIIKDNSKSQVFLKMNSLQTDDTAIYYCAKHYYYGGSYAMDYWGQGTSVTVSS

SEQ ID NO: 890 - protein, 30 aa, Artificial Sequence
  Description of Artificial Sequence: Synthetic polypeptide
  MISC_FEATURE (1)..(30): This sequence may encompass 1-6 'Gly Gly Gly Gly Ser' repeating units, wherein some positions may be absent
  See specification as filed for detailed description of substitutions and preferred embodiments
GGGGSGGGGSGGGGSGGGGSGGGGSGGGGS

SEQ ID NO: 891 - protein, 486 aa, Artificial Sequence
  Description of Artificial Sequence: Synthetic polypeptide
MALPVTALLLPLALLLHAARPDIQMTQTTSSLSASLGDRVTISCRASQDISKYLNWYQQKPDGTVKLLIYHTSRLHSGVPSRFSGSGSGTDYSLTISNLEQEDIATYFCQQGNTLPYTFGGGTKLEITGGGGSGGGGSGGGGSEVKLQESGPGLVAPSQSLSVTCTVSGVSLPDYGVSWIRQPPRKGLEWLGVIWGSETTYYNSALKSRLTIIKDNSKSQVFLKMNSLQTDDTAIYYCAKHYYYGGSYAMDYWGQGTSVTVSSTTTPAPRPPTPAPTIASQPLSLRPEACRPAAGGAVHTRGLDFACDIYIWAPLAGTCGVLLLSLVITLYCKRGRKKLLYIFKQPFMRPVQTTQEEDGCSCRFPEEEEGGCELRVKFSRSADAPAYKQGQNQLYNELNLGRREEYDVLDKRRGRDPEMGGKPRRKNPQEGLYNELQKDKMAEAYSEIGMKGERRRGKGHDGLYQGLSTATKDTYDALHMQALPPR

SEQ ID NO: 892 - protein, 465 aa, Artificial Sequence
  Description of Artificial Sequence: Synthetic polypeptide
DIQMTQTTSSLSASLGDRVTISCRASQDISKYLNWYQQKPDGTVKLLIYHTSRLHSGVPSRFSGSGSGTDYSLTISNLEQEDIATYFCQQGNTLPYTFGGGTKLEITGGGGSGGGGSGGGGSEVKLQESGPGLVAPSQSLSVTCTVSGVSLPDYGVSWIRQPPRKGLEWLGVIWGSETTYYNSALKSRLTIIKDNSKSQVFLKMNSLQTDDTAIYYCAKHYYYGGSYAMDYWGQGTSVTVSSTTTPAPRPPTPAPTIASQPLSLRPEACRPAAGGAVHTRGLDFACDIYIWAPLAGTCGVLLLSLVITLYCKRGRKKLLYIFKQPFMRPVQTTQEEDGCSCRFPEEEEGGCELRVKFSRSADAPAYKQGQNQLYNELNLGRREEYDVLDKRRGRDPEMGGKPRRKNPQEGLYNELQKDKMAEAYSEIGMKGERRRGKGHDGLYQGLSTATKDTYDALHMQALPPR

SEQ ID NO: 893 - protein, 242 aa, Artificial Sequence; identical to SEQ ID NO: 872
  Description of Artificial Sequence: Synthetic polypeptide

SEQ ID NO: 894 - DNA, 813 bp, Artificial Sequence
  Description of Artificial Sequence: Synthetic polynucleotide
atggccctccctgtcaccgccctgctgcttccgctggctcttctgctccacgccgctcggcccgaaattgtgatgacccagtcacccgccactcttagcctttcacccggtgagcgcgcaaccctgtcttgcagagcctcccaagacatctcaaaataccttaattggtatcaacagaagcccggacaggctcctcgccttctgatctaccacaccagccggctccattctggaatccctgccaggttcagcggtagcggatctgggaccgactacaccctcactatcagctcactgcagccagaggacttcgctgtctatttctgtcagcaagggaacaccctgccctacacctttggacagggcaccaagctcgagattaaaggtggaggtggcagcggaggaggtgggtccggcggtggaggaagccaggtccaactccaagaaagcggaccgggtcttgtgaagccatcagaaactctttcactgacttgtactgtgagcggagtgtctctccccgattacggggtgtcttggatcagacagccaccggggaagggtctggaatggattggagtgatttggggctctgagactacttactactcttcatccctcaagtcacgcgtcaccatctcaaaggacaactctaagaatcaggtgtcactgaaactgtcatctgtgaccgcagccgacaccgccgtgtactattgcgctaagcattactattatggcgggagctacgcaatggattactggggacagggtactctggtcaccgtgtccagccaccaccatcatcaccatcaccat

SEQ ID NO: 895 - protein, 271 aa, Artificial Sequence
  Description of Artificial Sequence: Synthetic polypeptide
MALPVTALLLPLALLLHAARPEIVMTQSPATLSLSPGERATLSCRASQDISKYLNWYQQKPGQAPRLLIYHTSRLHSGIPARFSGSGSGTDYTLTISSLQPEDFAVYFCQQGNTLPYTFGQGTKLEIKGGGGSGGGGSGGGGSQVQLQESGPGLVKPSETLSLTCTVSGVSLPDYGVSWIRQPPGKGLEWIGVIWGSETTYYSSSLKSRVTISKDNSKNQVSLKLSSVTAADTAVYYCAKHYYYGGSYAMDYWGQGTLVTVSSHHHHHHHH

SEQ ID NO: 896 - DNA, 1458 bp, Artificial Sequence
  Description of Artificial Sequence: Synthetic polynucleotide
atggccctccctgtcaccgccctgctgcttccgctggctcttctgctccacgccgctcggcccgaaattgtgatgacccagtcacccgccactcttagcctttcacccggtgagcgcgcaaccctgtcttgcagagcctcccaagacatctcaaaataccttaattggtatcaacagaagcccggacaggctcctcgccttctgatctaccacaccagccggctccattctggaatccctgccaggttcagcggtagcggatctgggaccgactacaccctcactatcagctcactgcagccagaggacttcgctgtctatttctgtcagcaagggaacaccctgccctacacctttggacagggcaccaagctcgagattaaaggtggaggtggcagcggaggaggtgggtccggcggtggaggaagccaggtccaactccaagaaagcggaccgggtcttgtgaagccatcagaaactctttcactgacttgtactgtgagcggagtgtctctccccgattacggggtgtcttggatcagacagccaccggggaagggtctggaatggattggagtgatttggggctctgagactacttactactcttcatccctcaagtcacgcgtcaccatctcaaaggacaactctaagaatcaggtgtcactgaaactgtcatctgtgaccgcagccgacaccgccgtgtactattgcgctaagcattactattatggcgggagctacgcaatggattactggggacagggtactctggtcaccgtgtccagcaccactaccccagcaccgaggccacccaccccggctcctaccatcgcctcccagcctctgtccctgcgtccggaggcatgtagacccgcagctggtggggccgtgcatacccggggtcttgacttcgcctgcgatatctacatttgggcccctctggctggtacttgcggggtcctgctgctttcactcgtgatcactctttactgtaagcgcggtcggaagaagctgctgtacatctttaagcaacccttcatgaggcctgtgcagactactcaagaggaggacggctgttcatgccggttcccagaggaggaggaaggcggctgcgaactgcgcgtgaaattcagccgcagcgcagatgctccagcctacaagcaggggcagaaccagctctacaacgaactcaatcttggtcggagagaggagtacgacgtgctggacaagcggagaggacgggacccagaaatgggcgggaagccgcgcagaaagaatccccaagagggcctgtacaacgagctccaaaaggataagatggcagaagcctatagcgagattggtatgaaaggggaacgcagaagaggcaaaggccacgacggactgtaccagggactcagcaccgccaccaaggacacctatgacgctcttcacatgcaggccctgccgcctcgg

SEQ ID NO: 897 - protein, 486 aa, Artificial Sequence
  Description of Artificial Sequence: Synthetic polypeptide
MALPVTALLLPLALLLHAARPEIVMTQSPATLSLSPGERATLSCRASQDISKYLNWYQQKPGQAPRLLIYHTSRLHSGIPARFSGSGSGTDYTLTISSLQPEDFAVYFCQQGNTLPYTFGQGTKLEIKGGGGSGGGGSGGGGSQVQLQESGPGLVKPSETLSLTCTVSGVSLPDYGVSWIRQPPGKGLEWIGVIWGSETTYYSSSLKSRVTISKDNSKNQVSLKLSSVTAADTAVYYCAKHYYYGGSYAMDYWGQGTLVTVSSTTTPAPRPPTPAPTIASQPLSLRPEACRPAAGGAVHTRGLDFACDIYIWAPLAGTCGVLLLSLVITLYCKRGRKKLLYIFKQPFMRPVQTTQEEDGCSCRFPEEEEGGCELRVKFSRSADAPAYKQGQNQLYNELNLGRREEYDVLDKRRGRDPEMGGKPRRKNPQEGLYNELQKDKMAEAYSEIGMKGERRRGKGHDGLYQGLSTATKDTYDALHMQALPPR

SEQ ID NO: 898 - protein, 242 aa, Artificial Sequence; identical to SEQ ID NO: 873
  Description of Artificial Sequence: Synthetic polypeptide

SEQ ID NO: 899 - DNA, 813 bp, Artificial Sequence
  Description of Artificial Sequence: Synthetic polynucleotide
atggccctccctgtcaccgccctgctgcttccgctggctcttctgctccacgccgctcggcccgaaattgtgatgacccagtcacccgccactcttagcctttcacccggtgagcgcgcaaccctgtcttgcagagcctcccaagacatctcaaaataccttaattggtatcaacagaagcccggacaggctcctcgccttctgatctaccacaccagccggctccattctggaatccctgccaggttcagcggtagcggatctgggaccgactacaccctcactatcagctcactgcagccagaggacttcgctgtctatttctgtcagcaagggaacaccctgccctacacctttggacagggcaccaagctcgagattaaaggtggaggtggcagcggaggaggtgggtccggcggtggaggaagccaggtccaactccaagaaagcggaccgggtcttgtgaagccatcagaaactctttcactgacttgtactgtgagcggagtgtctctccccgattacggggtgtcttggatcagacagccaccggggaagggtctggaatggattggagtgatttggggctctgagactacttactaccaatcatccctcaagtcacgcgtcaccatctcaaaggacaactctaagaatcaggtgtcactgaaactgtcatctgtgaccgcagccgacaccgccgtgtactattgcgctaagcattactattatggcgggagctacgcaatggattactggggacagggtactctggtcaccgtgtccagccaccaccatcatcaccatcaccat

SEQ ID NO: 900 - protein, 271 aa, Artificial Sequence
  Description of Artificial Sequence: Synthetic polypeptide
MALPVTALLLPLALLLHAARPEIVMTQSPATLSLSPGERATLSCRASQDISKYLNWYQQKPGQAPRLLIYHTSRLHSGIPARFSGSGSGTDYTLTISSLQPEDFAVYFCQQGNTLPYTFGQGTKLEIKGGGGSGGGGSGGGGSQVQLQESGPGLVKPSETLSLTCTVSGVSLPDYGVSWIRQPPGKGLEWIGVIWGSETTYYQSSLKSRVTISKDNSKNQVSLKLSSVTAADTAVYYCAKHYYYGGSYAMDYWGQGTLVTVSSHHHHHHHH

SEQ ID NO: 901 - DNA, 1458 bp, Artificial Sequence
  Description of Artificial Sequence: Synthetic polynucleotide
atggccctccctgtcaccgccctgctgcttccgctggctcttctgctccacgccgctcggcccgaaattgtgatgacccagtcacccgccactcttagcctttcacccggtgagcgcgcaaccctgtcttgcagagcctcccaagacatctcaaaataccttaattggtatcaacagaagcccggacaggctcctcgccttctgatctaccacaccagccggctccattctggaatccctgccaggttcagcggtagcggatctgggaccgactacaccctcactatcagctcactgcagccagaggacttcgctgtctatttctgtcagcaagggaacaccctgccctacacctttggacagggcaccaagctcgagattaaaggtggaggtggcagcggaggaggtgggtccggcggtggaggaagccaggtccaactccaagaaagcggaccgggtcttgtgaagccatcagaaactctttcactgacttgtactgtgagcggagtgtctctccccgattacggggtgtcttggatcagacagccaccggggaagggtctggaatggattggagtgatttggggctctgagactacttactaccaatcatccctcaagtcacgcgtcaccatctcaaaggacaactctaagaatcaggtgtcactgaaactgtcatctgtgaccgcagccgacaccgccgtgtactattgcgctaagcattactattatggcgggagctacgcaatggattactggggacagggtactctggtcaccgtgtccagcaccactaccccagcaccgaggccacccaccccggctcctaccatcgcctcccagcctctgtccctgcgtccggaggcatgtagacccgcagctggtggggccgtgcatacccggggtcttgacttcgcctgcgatatctacatttgggcccctctggctggtacttgcggggtcctgctgctttcactcgtgatcactctttactgtaagcgcggtcggaagaagctgctgtacatctttaagcaacccttcatgaggcctgtgcagactactcaagaggaggacggctgttcatgccggttcccagaggaggaggaaggcggctgcgaactgcgcgtgaaattcagccgcagcgcagatgctccagcctacaagcaggggcagaaccagctctacaacgaactcaatcttggtcggagagaggagtacgacgtgctggacaagcggagaggacgggacccagaaatgggcgggaagccgcgcagaaagaatccccaagagggcctgtacaacgagctccaaaaggataagatggcagaagcctatagcgagattggtatgaaaggggaacgcagaagaggcaaaggccacgacggactgtaccagggactcagcaccgccaccaaggacacctatgacgctcttcacatgcaggccctgccgcctcgg

SEQ ID NO: 902 - protein, 486 aa, Artificial Sequence
  Description of Artificial Sequence: Synthetic polypeptide
MALPVTALLLPLALLLHAARPEIVMTQSPATLSLSPGERATLSCRASQDISKYLNWYQQKPGQAPRLLIYHTSRLHSGIPARFSGSGSGTDYTLTISSLQPEDFAVYFCQQGNTLPYTFGQGTKLEIKGGGGSGGGGSGGGGSQVQLQESGPGLVKPSETLSLTCTVSGVSLPDYGVSWIRQPPGKGLEWIGVIWGSETTYYQSSLKSRVTISKDNSKNQVSLKLSSVTAADTAVYYCAKHYYYGGSYAMDYWGQGTLVTVSSTTTPAPRPPTPAPTIASQPLSLRPEACRPAAGGAVHTRGLDFACDIYIWAPLAGTCGVLLLSLVITLYCKRGRKKLLYIFKQPFMRPVQTTQEEDGCSCRFPEEEEGGCELRVKFSRSADAPAYKQGQNQLYNELNLGRREEYDVLDKRRGRDPEMGGKPRRKNPQEGLYNELQKDKMAEAYSEIGMKGERRRGKGHDGLYQGLSTATKDTYDALHMQALPPR

SEQ ID NO: 903 - protein, 242 aa, Artificial Sequence; identical to SEQ ID NO: 874
  Description of Artificial Sequence: Synthetic polypeptide

SEQ ID NO: 904 - DNA, 813 bp, Artificial Sequence
  Description of Artificial Sequence: Synthetic polynucleotide
atggctctgcccgtgaccgcactcctcctgccactggctctgctgcttcacgccgctcgcccacaagtccagcttcaagaatcagggcctggtctggtgaagccatctgagactctgtccctcacttgcaccgtgagcggagtgtccctcccagactacggagtgagctggattagacagcctcccggaaagggactggagtggatcggagtgatttggggtagcgaaaccacttactattcatcttccctgaagtcacgggtcaccatttcaaaggataactcaaagaatcaagtgagcctcaagctctcatcagtcaccgccgctgacaccgccgtgtattactgtgccaagcattactactatggagggtcctacgccatggactactggggccagggaactctggtcactgtgtcatctggtggaggaggtagcggaggaggcgggagcggtggaggtggctccgaaatcgtgatgacccagagccctgcaaccctgtccctttctcccggggaacgggctaccctttcttgtcgggcatcacaagatatctcaaaatacctcaattggtatcaacagaagccgggacaggcccctaggcttcttatctaccacacctctcgcctgcatagcgggattcccgcacgctttagcgggtctggaagcgggaccgactacactctgaccatctcatctctccagcccgaggacttcgccgtctacttctgccagcagggtaacaccctgccgtacaccttcggccagggcaccaagcttgagatcaaacatcaccaccatcatcaccatcac

SEQ ID NO: 905 - protein, 271 aa, Artificial Sequence
  Description of Artificial Sequence: Synthetic polypeptide
MALPVTALLLPLALLLHAARPQVQLQESGPGLVKPSETLSLTCTVSGVSLPDYGVSWIRQPPGKGLEWIGVIWGSETTYYSSSLKSRVTISKDNSKNQVSLKLSSVTAADTAVYYCAKHYYYGGSYAMDYWGQGTLVTVSSGGGGSGGGGSGGGGSEIVMTQSPATLSLSPGERATLSCRASQDISKYLNWYQQKPGQAPRLLIYHTSRLHSGIPARFSGSGSGTDYTLTISSLQPEDFAVYFCQQGNTLPYTFGQGTKLEIKHHHHHHHH

SEQ ID NO: 906 - DNA, 1458 bp, Artificial Sequence
  Description of Artificial Sequence: Synthetic polynucleotide
atggctctgcccgtgaccgcactcctcctgccactggctctgctgcttcacgccgctcgcccacaagtccagcttcaagaatcagggcctggtctggtgaagccatctgagactctgtccctcacttgcaccgtgagcggagtgtccctcccagactacggagtgagctggattagacagcctcccggaaagggactggagtggatcggagtgatttggggtagcgaaaccacttactattcatcttccctgaagtcacgggtcaccatttcaaaggataactcaaagaatcaagtgagcctcaagctctcatcagtcaccgccgctgacaccgccgtgtattactgtgccaagcattactactatggagggtcctacgccatggactactggggccagggaactctggtcactgtgtcatctggtggaggaggtagcggaggaggcgggagcggtggaggtggctccgaaatcgtgatgacccagagccctgcaaccctgtccctttctcccggggaacgggctaccctttcttgtcgggcatcacaagatatctcaaaatacctcaattggtatcaacagaagccgggacaggcccctaggcttcttatctaccacacctctcgcctgcatagcgggattcccgcacgctttagcgggtctggaagcgggaccgactacactctgaccatctcatctctccagcccgaggacttcgccgtctacttctgccagcagggtaacaccctgccgtacaccttcggccagggcaccaagcttgagatcaaaaccactactcccgctccaaggccacccacccctgccccgaccatcgcctctcagccgctttccctgcgtccggaggcatgtagacccgcagctggtggggccgtgcatacccggggtcttgacttcgcctgcgatatctacatttgggcccctctggctggtacttgcggggtcctgctgctttcactcgtgatcactctttactgtaagcgcggtcggaagaagctgctgtacatctttaagcaacccttcatgaggcctgtgcagactactcaagaggaggacggctgttcatgccggttcccagaggaggaggaaggcggctgcgaactgcgcgtgaaattcagccgcagcgcagatgctccagcctacaagcaggggcagaaccagctctacaacgaactcaatcttggtcggagagaggagtacgacgtgctggacaagcggagaggacgggacccagaaatgggcgggaagccgcgcagaaagaatccccaagagggcctgtacaacgagctccaaaaggataagatggcagaagcctatagcgagattggtatgaaaggggaacgcagaagaggcaaaggccacgacggactgtaccagggactcagcaccgccaccaaggacacctatgacgctcttcacatgcaggccctgccgcctcgg

SEQ ID NO: 907 - protein, 486 aa, Artificial Sequence
  Description of Artificial Sequence: Synthetic polypeptide
MALPVTALLLPLALLLHAARPQVQLQESGPGLVKPSETLSLTCTVSGVSLPDYGVSWIRQPPGKGLEWIGVIWGSETTYYSSSLKSRVTISKDNSKNQVSLKLSSVTAADTAVYYCAKHYYYGGSYAMDYWGQGTLVTVSSGGGGSGGGGSGGGGSEIVMTQSPATLSLSPGERATLSCRASQDISKYLNWYQQKPGQAPRLLIYHTSRLHSGIPARFSGSGSGTDYTLTISSLQPEDFAVYFCQQGNTLPYTFGQGTKLEIKTTTPAPRPPTPAPTIASQPLSLRPEACRPAAGGAVHTRGLDFACDIYIWAPLAGTCGVLLLSLVITLYCKRGRKKLLYIFKQPFMRPVQTTQEEDGCSCRFPEEEEGGCELRVKFSRSADAPAYKQGQNQLYNELNLGRREEYDVLDKRRGRDPEMGGKPRRKNPQEGLYNELQKDKMAEAYSEIGMKGERRRGKGHDGLYQGLSTATKDTYDALHMQALPPR

SEQ ID NO: 908 - protein, 242 aa, Artificial Sequence; identical to SEQ ID NO: 875
  Description of Artificial Sequence: Synthetic polypeptide

SEQ ID NO: 909 - DNA, 813 bp, Artificial Sequence
  Description of Artificial Sequence: Synthetic polynucleotide
atggctctgcccgtgaccgcactcctcctgccactggctctgctgcttcacgccgctcgcccacaagtccagcttcaagaatcagggcctggtctggtgaagccatctgagactctgtccctcacttgcaccgtgagcggagtgtccctcccagactacggagtgagctggattagacagcctcccggaaagggactggagtggatcggagtgatttggggtagcgaaaccacttactatcaatcttccctgaagtcacgggtcaccatttcaaaggataactcaaagaatcaagtgagcctcaagctctcatcagtcaccgccgctgacaccgccgtgtattactgtgccaagcattactactatggagggtcctacgccatggactactggggccagggaactctggtcactgtgtcatctggtggaggaggtagcggaggaggcgggagcggtggaggtggctccgaaatcgtgatgacccagagccctgcaaccctgtccctttctcccggggaacgggctaccctttcttgtcgggcatcacaagatatctcaaaatacctcaattggtatcaacagaagccgggacaggcccctaggcttcttatctaccacacctctcgcctgcatagcgggattcccgcacgctttagcgggtctggaagcgggaccgactacactctgaccatctcatctctccagcccgaggacttcgccgtctacttctgccagcagggtaacaccctgccgtacaccttcggccagggcaccaagcttgagatcaaacatcaccaccatcatcaccatcac

SEQ ID NO: 910 - protein, 271 aa, Artificial Sequence
  Description of Artificial Sequence: Synthetic polypeptide
MALPVTALLLPLALLLHAARPQVQLQESGPGLVKPSETLSLTCTVSGVSLPDYGVSWIRQPPGKGLEWIGVIWGSETTYYQSSLKSRVTISKDNSKNQVSLKLSSVTAADTAVYYCAKHYYYGGSYAMDYWGQGTLVTVSSGGGGSGGGGSGGGGSEIVMTQSPATLSLSPGERATLSCRASQDISKYLNWYQQKPGQAPRLLIYHTSRLHSGIPARFSGSGSGTDYTLTISSLQPEDFAVYFCQQGNTLPYTFGQGTKLEIKHHHHHHHH

SEQ ID NO: 911 - DNA, 1458 bp, Artificial Sequence
  Description of Artificial Sequence: Synthetic polynucleotide
atggctctgcccgtgaccgcactcctcctgccactggctctgctgcttcacgccgctcgcccacaagtccagcttcaagaatcagggcctggtctggtgaagccatctgagactctgtccctcacttgcaccgtgagcggagtgtccctcccagactacggagtgagctggattagacagcctcccggaaagggactggagtggatcggagtgatttggggtagcgaaaccacttactatcaatcttccctgaagtcacgggtcaccatttcaaaggataactcaaagaatcaagtgagcctcaagctctcatcagtcaccgccgctgacaccgccgtgtattactgtgccaagcattactactatggagggtcctacgccatggactactggggccagggaactctggtcactgtgtcatctggtggaggaggtagcggaggaggcgggagcggtggaggtggctccgaaatcgtgatgacccagagccctgcaaccctgtccctttctcccggggaacgggctaccctttcttgtcgggcatcacaagatatctcaaaatacctcaattggtatcaacagaagccgggacaggcccctaggcttcttatctaccacacctctcgcctgcatagcgggattcccgcacgctttagcgggtctggaagcgggaccgactacactctgaccatctcatctctccagcccgaggacttcgccgtctacttctgccagcagggtaacaccctgccgtacaccttcggccagggcaccaagcttgagatcaaaaccactactcccgctccaaggccacccacccctgccccgaccatcgcctctcagccgctttccctgcgtccggaggcatgtagacccgcagctggtggggccgtgcatacccggggtcttgacttcgcctgcgatatctacatttgggcccctctggctggtacttgcggggtcctgctgctttcactcgtgatcactctttactgtaagcgcggtcggaagaagctgctgtacatctttaagcaacccttcatgaggcctgtgcagactactcaagaggaggacggctgttcatgccggttcccagaggaggaggaaggcggctgcgaactgcgcgtgaaattcagccgcagcgcagatgctccagcctacaagcaggggcagaaccagctctacaacgaactcaatcttggtcggagagaggagtacgacgtgctggacaagcggagaggacgggacccagaaatgggcgggaagccgcgcagaaagaatccccaagagggcctgtacaacgagctccaaaaggataagatggcagaagcctatagcgagattggtatgaaaggggaacgcagaagaggcaaaggccacgacggactgtaccagggactcagcaccgccaccaaggacacctatgacgctcttcacatgcaggccctgccgcctcgg

SEQ ID NO: 912 - protein, 486 aa, Artificial Sequence
  Description of Artificial Sequence: Synthetic polypeptide
MALPVTALLLPLALLLHAARPQVQLQESGPGLVKPSETLSLTCTVSGVSLPDYGVSWIRQPPGKGLEWIGVIWGSETTYYQSSLKSRVTISKDNSKNQVSLKLSSVTAADTAVYYCAKHYYYGGSYAMDYWGQGTLVTVSSGGGGSGGGGSGGGGSEIVMTQSPATLSLSPGERATLSCRASQDISKYLNWYQQKPGQAPRLLIYHTSRLHSGIPARFSGSGSGTDYTLTISSLQPEDFAVYFCQQGNTLPYTFGQGTKLEIKTTTPAPRPPTPAPTIASQPLSLRPEACRPAAGGAVHTRGLDFACDIYIWAPLAGTCGVLLLSLVITLYCKRGRKKLLYIFKQPFMRPVQTTQEEDGCSCRFPEEEEGGCELRVKFSRSADAPAYKQGQNQLYNELNLGRREEYDVLDKRRGRDPEMGGKPRRKNPQEGLYNELQKDKMAEAYSEIGMKGERRRGKGHDGLYQGLSTATKDTYDALHMQALPPR

SEQ ID NO: 913 - protein, 247 aa, Artificial Sequence; identical to SEQ ID NO: 876
  Description of Artificial Sequence: Synthetic polypeptide

SEQ ID NO: 914 - DNA, 828 bp, Artificial Sequence
  Description of Artificial Sequence: Synthetic polynucleotide
atggccctcccagtgaccgctctgctgctgcctctcgcacttcttctccatgccgctcggcctgagatcgtcatgacccaaagccccgctaccctgtccctgtcacccggcgagagggcaaccctttcatgcagggccagccaggacatttctaagtacctcaactggtatcagcagaagccagggcaggctcctcgcctgctgatctaccacaccagccgcctccacagcggtatccccgccagattttccgggagcgggtctggaaccgactacaccctcaccatctcttctctgcagcccgaggatttcgccgtctatttctgccagcaggggaatactctgccgtacaccttcggtcaaggtaccaagctggaaatcaagggaggcggaggatcaggcggtggcggaagcggaggaggtggctccggaggaggaggttcccaagtgcagcttcaagaatcaggacccggacttgtgaagccatcagaaaccctctccctgacttgtaccgtgtccggtgtgagcctccccgactacggagtctcttggattcgccagcctccggggaagggtcttgaatggattggggtgatttggggatcagagactacttactactcttcatcacttaagtcacgggtcaccatcagcaaagataatagcaagaaccaagtgtcacttaagctgtcatctgtgaccgccgctgacaccgccgtgtactattgtgccaaacattactattacggagggtcttatgctatggactactggggacaggggaccctggtgactgtctctagccatcaccatcaccaccatcatcac

SEQ ID NO: 915 - protein, 276 aa, Artificial Sequence
  Description of Artificial Sequence: Synthetic polypeptide
MALPVTALLLPLALLLHAARPEIVMTQSPATLSLSPGERATLSCRASQDISKYLNWYQQKPGQAPRLLIYHTSRLHSGIPARFSGSGSGTDYTLTISSLQPEDFAVYFCQQGNTLPYTFGQGTKLEIKGGGGSGGGGSGGGGSGGGGSQVQLQESGPGLVKPSETLSLTCTVSGVSLPDYGVSWIRQPPGKGLEWIGVIWGSETTYYSSSLKSRVTISKDNSKNQVSLKLSSVTAADTAVYYCAKHYYYGGSYAMDYWGQGTLVTVSSHHHHHHHH

SEQ ID NO: 916 - DNA, 1473 bp, Artificial Sequence
  Description of Artificial Sequence: Synthetic polynucleotide
atggccctccctgtcaccgccctgctgcttccgctggctcttctgctccacgccgctcggcccgaaattgtgatgacccagtcacccgccactcttagcctttcacccggtgagcgcgcaaccctgtcttgcagagcctcccaagacatctcaaaataccttaattggtatcaacagaagcccggacaggctcctcgccttctgatctaccacaccagccggctccattctggaatccctgccaggttcagcggtagcggatctgggaccgactacaccctcactatcagctcactgcagccagaggacttcgctgtctatttctgtcagcaagggaacaccctgccctacacctttggacagggcaccaagctcgagattaaaggtggaggtggcagcggaggaggtgggtccggcggtggaggaagcggcggaggcgggagccaggtccaactccaagaaagcggaccgggtcttgtgaagccatcagaaactctttcactgacttgtactgtgagcggagtgtctctccccgattacggggtgtcttggatcagacagccaccggggaagggtctggaatggattggagtgatttggggctctgagactacttactactcttcatccctcaagtcacgcgtcaccatctcaaaggacaactctaagaatcaggtgtcactgaaactgtcatctgtgaccgcagccgacaccgccgtgtactattgcgctaagcattactattatggcgggagctacgcaatggattactggggacagggtactctggtcaccgtgtccagcaccactaccccagcaccgaggccacccaccccggctcctaccatcgcctcccagcctctgtccctgcgtccggaggcatgtagacccgcagctggtggggccgtgcatacccggggtcttgacttcgcctgcgatatctacatttgggcccctctggctggtacttgcggggtcctgctgctttcactcgtgatcactctttactgtaagcgcggtcggaagaagctgctgtacatctttaagcaacccttcatgaggcctgtgcagactactcaagaggaggacggctgttcatgccggttcccagaggaggaggaaggcggctgcgaactgcgcgtgaaattcagccgcagcgcagatgctccagcctacaagcaggggcagaaccagctctacaacgaactcaatcttggtcggagagaggagtacgacgtgctggacaagcggagaggacgggacccagaaatgggcgggaagccgcgcagaaagaatccccaagagggcctgtacaacgagctccaaaaggataagatggcagaagcctatagcgagattggtatgaaaggggaacgcagaagaggcaaaggccacgacggactgtaccagggactcagcaccgccaccaaggacacctatgacgctcttcacatgcaggccctgccgcctcgg

SEQ ID NO: 917 - protein, 491 aa, Artificial Sequence
  Description of Artificial Sequence: Synthetic polypeptide
MALPVTALLLPLALLLHAARPEIVMTQSPATLSLSPGERATLSCRASQDISKYLNWYQQKPGQAPRLLIYHTSRLHSGIPARFSGSGSGTDYTLTISSLQPEDFAVYFCQQGNTLPYTFGQGTKLEIKGGGGSGGGGSGGGGSGGGGSQVQLQESGPGLVKPSETLSLTCTVSGVSLPDYGVSWIRQPPGKGLEWIGVIWGSETTYYSSSLKSRVTISKDNSKNQVSLKLSSVTAADTAVYYCAKHYYYGGSYAMDYWGQGTLVTVSSTTTPAPRPPTPAPTIASQPLSLRPEACRPAAGGAVHTRGLDFACDIYIWAPLAGTCGVLLLSLVITLYCKRGRKKLLYIFKQPFMRPVQTTQEEDGCSCRFPEEEEGGCELRVKFSRSADAPAYKQGQNQLYNELNLGRREEYDVLDKRRGRDPEMGGKPRRKNPQEGLYNELQKDKMAEAYSEIGMKGERRRGKGHDGLYQGLSTATKDTYDALHMQALPPR

SEQ ID NO: 918 - protein, 247 aa, Artificial Sequence; identical to SEQ ID NO: 877
  Description of Artificial Sequence: Synthetic polypeptide

SEQ ID NO: 919 - DNA, 828 bp, Artificial Sequence
  Description of Artificial Sequence: Synthetic polynucleotide
atggccctcccagtgaccgctctgctgctgcctctcgcacttcttctccatgccgctcggcctgagatcgtcatgacccaaagccccgctaccctgtccctgtcacccggcgagagggcaaccctttcatgcagggccagccaggacatttctaagtacctcaactggtatcagcagaagccagggcaggctcctcgcctgctgatctaccacaccagccgcctccacagcggtatccccgccagattttccgggagcgggtctggaaccgactacaccctcaccatctcttctctgcagcccgaggatttcgccgtctatttctgccagcaggggaatactctgccgtacaccttcggtcaaggtaccaagctggaaatcaagggaggcggaggatcaggcggtggcggaagcggaggaggtggctccggaggaggaggttcccaagtgcagcttcaagaatcaggacccggacttgtgaagccatcagaaaccctctccctgacttgtaccgtgtccggtgtgagcctccccgactacggagtctcttggattcgccagcctccggggaagggtcttgaatggattggggtgatttggggatcagagactacttactaccagtcatcacttaagtcacgggtcaccatcagcaaagataatagcaagaaccaagtgtcacttaagctgtcatctgtgaccgccgctgacaccgccgtgtactattgtgccaaacattactattacggagggtcttatgctatggactactggggacaggggaccctggtgactgtctctagccatcaccatcaccaccatcatcac

SEQ ID NO: 920 - protein, 276 aa, Artificial Sequence
  Description of Artificial Sequence: Synthetic polypeptide
MALPVTALLLPLALLLHAARPEIVMTQSPATLSLSPGERATLSCRASQDISKYLNWYQQKPGQAPRLLIYHTSRLHSGIPARFSGSGSGTDYTLTISSLQPEDFAVYFCQQGNTLPYTFGQGTKLEIKGGGGSGGGGSGGGGSGGGGSQVQLQESGPGLVKPSETLSLTCTVSGVSLPDYGVSWIRQPPGKGLEWIGVIWGSETTYYQSSLKSRVTISKDNSKNQVSLKLSSVTAADTAVYYCAKHYYYGGSYAMDYWGQGTLVTVSSHHHHHHHH

SEQ ID NO: 921 - DNA, 1473 bp, Artificial Sequence
  Description of Artificial Sequence: Synthetic polynucleotide
atggccctccctgtcaccgccctgctgcttccgctggctcttctgctccacgccgctcggcccgaaattgtgatgacccagtcacccgccactcttagcctttcacccggtgagcgcgcaaccctgtcttgcagagcctcccaagacatctcaaaataccttaattggtatcaacagaagcccggacaggctcctcgccttctgatctaccacaccagccggctccattctggaatccctgccaggttcagcggtagcggatctgggaccgactacaccctcactatcagctcactgcagccagaggacttcgctgtctatttctgtcagcaagggaacaccctgccctacacctttggacagggcaccaagctcgagattaaaggtggaggtggcagcggaggaggtgggtccggcggtggaggaagcggaggcggagggagccaggtccaactccaagaaagcggaccgggtcttgtgaagccatcagaaactctttcactgacttgtactgtgagcggagtgtctctccccgattacggggtgtcttggatcagacagccaccggggaagggtctggaatggattggagtgatttggggctctgagactacttactaccaatcatccctcaagtcacgcgtcaccatctcaaaggacaactctaagaatcaggtgtcactgaaactgtcatctgtgaccgcagccgacaccgccgtgtactattgcgctaagcattactattatggcgggagctacgcaatggattactggggacagggtactctggtcaccgtgtccagcaccactaccccagcaccgaggccacccaccccggctcctaccatcgcctcccagcctctgtccctgcgtccggaggcatgtagacccgcagctggtggggccgtgcatacccggggtcttgacttcgcctgcgatatctacatttgggcccctctggctggtacttgcggggtcctgctgctttcactcgtgatcactctttactgtaagcgcggtcggaagaagctgctgtacatctttaagcaacccttcatgaggcctgtgcagactactcaagaggaggacggctgttcatgccggttcccagaggaggaggaaggcggctgcgaactgcgcgtgaaattcagccgcagcgcagatgctccagcctacaagcaggggcagaaccagctctacaacgaactcaatcttggtcggagagaggagtacgacgtgctggacaagcggagaggacgggacccagaaatgggcgggaagccgcgcagaaagaatccccaagagggcctgtacaacgagctccaaaaggataagatggcagaagcctatagcgagattggtatgaaaggggaacgcagaagaggcaaaggccacgacggactgtaccagggactcagcaccgccaccaaggacacctatgacgctcttcacatgcaggccctgccgcctcgg

SEQ ID NO: 922 - protein, 491 aa, Artificial Sequence
  Description of Artificial Sequence: Synthetic polypeptide
MALPVTALLLPLALLLHAARPEIVMTQSPATLSLSPGERATLSCRASQDISKYLNWYQQKPGQAPRLLIYHTSRLHSGIPARFSGSGSGTDYTLTISSLQPEDFAVYFCQQGNTLPYTFGQGTKLEIKGGGGSGGGGSGGGGSGGGGSQVQLQESGPGLVKPSETLSLTCTVSGVSLPDYGVSWIRQPPGKGLEWIGVIWGSETTYYQSSLKSRVTISKDNSKNQVSLKLSSVTAADTAVYYCAKHYYYGGSYAMDYWGQGTLVTVSSTTTPAPRPPTPAPTIASQPLSLRPEACRPAAGGAVHTRGLDFACDIYIWAPLAGTCGVLLLSLVITLYCKRGRKKLLYIFKQPFMRPVQTTQEEDGCSCRFPEEEEGGCELRVKFSRSADAPAYKQGQNQLYNELNLGRREEYDVLDKRRGRDPEMGGKPRRKNPQEGLYNELQKDKMAEAYSEIGMKGERRRGKGHDGLYQGLSTATKDTYDALHMQALPPR

SEQ ID NO: 923 - protein, 247 aa, Artificial Sequence; identical to SEQ ID NO: 878
  Description of Artificial Sequence: Synthetic polypeptide

SEQ ID NO: 924 - DNA, 828 bp, Artificial Sequence
  Description of Artificial Sequence: Synthetic polynucleotide
atggcactgcctgtcactgccctcctgctgcctctggccctccttctgcatgccgccaggccccaagtccagctgcaagagtcaggacccggactggtgaagccgtctgagactctctcactgacttgtaccgtcagcggcgtgtccctccccgactacggagtgtcatggatccgccaacctcccgggaaagggcttgaatggattggtgtcatctggggttctgaaaccacctactactcatcttccctgaagtccagggtgaccatcagcaaggataattccaagaaccaggtcagccttaagctgtcatctgtgaccgctgctgacaccgccgtgtattactgcgccaagcactactattacggaggaagctacgctatggactattggggacagggcactctcgtgactgtgagcagcggcggtggagggtctggaggtggaggatccggtggtggtgggtcaggcggaggagggagcgagattgtgatgactcagtcaccagccaccctttctctttcacccggcgagagagcaaccctgagctgtagagccagccaggacatttctaagtacctcaactggtatcagcaaaaaccggggcaggcccctcgcctcctgatctaccatacctcacgccttcactctggtatccccgctcggtttagcggatcaggatctggtaccgactacactctgaccatttccagcctgcagccagaagatttcgcagtgtatttctgccagcagggcaatacccttccttacaccttcggtcagggaaccaagctcgaaatcaagcaccatcaccatcatcaccaccat

SEQ ID NO: 925 - protein, 276 aa, Artificial Sequence
  Description of Artificial Sequence: Synthetic polypeptide
MALPVTALLLPLALLLHAARPQVQLQESGPGLVKPSETLSLTCTVSGVSLPDYGVSWIRQPPGKGLEWIGVIWGSETTYYSSSLKSRVTISKDNSKNQVSLKLSSVTAADTAVYYCAKHYYYGGSYAMDYWGQGTLVTVSSGGGGSGGGGSGGGGSGGGGSEIVMTQSPATLSLSPGERATLSCRASQDISKYLNWYQQKPGQAPRLLIYHTSRLHSGIPARFSGSGSGTDYTLTISSLQPEDFAVYFCQQGNTLPYTFGQGTKLEIKHHHHHHHH

SEQ ID NO: 926 - DNA, 1473 bp, Artificial Sequence
  Description of Artificial Sequence: Synthetic polynucleotide
atggctctgcccgtgaccgcactcctcctgccactggctctgctgcttcacgccgctcgcccacaagtccagcttcaagaatcagggcctggtctggtgaagccatctgagactctgtccctcacttgcaccgtgagcggagtgtccctcccagactacggagtgagctggattagacagcctcccggaaagggactggagtggatcggagtgatttggggtagcgaaaccacttactattcatcttccctgaagtcacgggtcaccatttcaaaggataactcaaagaatcaagtgagcctcaagctctcatcagtcaccgccgctgacaccgccgtgtattactgtgccaagcattactactatggagggtcctacgccatggactactggggccagggaactctggtcactgtgtcatctggtggaggaggtagcggaggaggcgggagcggtggaggtggctccggaggtggcggaagcgaaatcgtgatgacccagagccctgcaaccctgtccctttctcccggggaacgggctaccctttcttgtcgggcatcacaagatatctcaaaatacctcaattggtatcaacagaagccgggacaggcccctaggcttcttatctaccacacctctcgcctgcatagcgggattcccgcacgctttagcgggtctggaagcgggaccgactacactctgaccatctcatctctccagcccgaggacttcgccgtctacttctgccagcagggtaacaccctgccgtacaccttcggccagggcaccaagcttgagatcaaaaccactactcccgctccaaggccacccacccctgccccgaccatcgcctctcagccgctttccctgcgtccggaggcatgtagacccgcagctggtggggccgtgcatacccggggtcttgacttcgcctgcgatatctacatttgggcccctctggctggtacttgcggggtcctgctgctttcactcgtgatcactctttactgtaagcgcggtcggaagaagctgctgtacatctttaagcaacccttcatgaggcctgtgcagactactcaagaggaggacggctgttcatgccggttcccagaggaggaggaaggcggctgcgaactgcgcgtgaaattcagccgcagcgcagatgctccagcctacaagcaggggcagaaccagctctacaacgaactcaatcttggtcggagagaggagtacgacgtgctggacaagcggagaggacgggacccagaaatgggcgggaagccgcgcagaaagaatccccaagagggcctgtacaacgagctccaaaaggataagatggcagaagcctatagcgagattggtatgaaaggggaacgcagaagaggcaaaggccacgacggactgtaccagggactcagcaccgccaccaaggacacctatgacgctcttcacatgcaggccctgccgcctcgg

SEQ ID NO: 927 - protein, 491 aa, Artificial Sequence
  Description of Artificial Sequence: Synthetic polypeptide
MALPVTALLLPLALLLHAARPQVQLQESGPGLVKPSETLSLTCTVSGVSLPDYGVSWIRQPPGKGLEWIGVIWGSETTYYSSSLKSRVTISKDNSKNQVSLKLSSVTAADTAVYYCAKHYYYGGSYAMDYWGQGTLVTVSSGGGGSGGGGSGGGGSGGGGSEIVMTQSPATLSLSPGERATLSCRASQDISKYLNWYQQKPGQAPRLLIYHTSRLHSGIPARFSGSGSGTDYTLTISSLQPEDFAVYFCQQGNTLPYTFGQGTKLEIKTTTPAPRPPTPAPTIASQPLSLRPEACRPAAGGAVHTRGLDFACDIYIWAPLAGTCGVLLLSLVITLYCKRGRKKLLYIFKQPFMRPVQTTQEEDGCSCRFPEEEEGGCELRVKFSRSADAPAYKQGQNQLYNELNLGRREEYDVLDKRRGRDPEMGGKPRRKNPQEGLYNELQKDKMAEAYSEIGMKGERRRGKGHDGLYQGLSTATKDTYDALHMQALPPR

SEQ ID NO: 928 - protein, 247 aa, Artificial Sequence; identical to SEQ ID NO: 879
  Description of Artificial Sequence: Synthetic polypeptide

SEQ ID NO: 929 - DNA, 828 bp, Artificial Sequence
  Description of Artificial Sequence: Synthetic polynucleotide
atggcactgcctgtcactgccctcctgctgcctctggccctccttctgcatgccgccaggccccaagtccagctgcaagagtcaggacccggactggtgaagccgtctgagactctctcactgacttgtaccgtcagcggcgtgtccctccccgactacggagtgtcatggatccgccaacctcccgggaaagggcttgaatggattggtgtcatctggggttctgaaaccacctactaccagtcttccctgaagtccagggtgaccatcagcaaggataattccaagaaccaggtcagccttaagctgtcatctgtgaccgctgctgacaccgccgtgtattactgcgccaagcactactattacggaggaagctacgctatggactattggggacagggcactctcgtgactgtgagcagcggcggtggagggtctggaggtggaggatccggtggtggtgggtcaggcggaggagggagcgagattgtgatgactcagtcaccagccaccctttctctttcacccggcgagagagcaaccctgagctgtagagccagccaggacatttctaagtacctcaactggtatcagcaaaaaccggggcaggcccctcgcctcctgatctaccatacctcacgccttcactctggtatccccgctcggtttagcggatcaggatctggtaccgactacactctgaccatttccagcctgcagccagaagatttcgcagtgtatttctgccagcagggcaatacccttccttacaccttcggtcagggaaccaagctcgaaatcaagcaccatcaccatcatcatcaccac

SEQ ID NO: 930 - protein, 276 aa, Artificial Sequence
  Description of Artificial Sequence: Synthetic polypeptide
MALPVTALLLPLALLLHAARPQVQLQESGPGLVKPSETLSLTCTVSGVSLPDYGVSWIRQPPGKGLEWIGVIWGSETTYYQSSLKSRVTISKDNSKNQVSLKLSSVTAADTAVYYCAKHYYYGGSYAMDYWGQGTLVTVSSGGGGSGGGGSGGGGSGGGGSEIVMTQSPATLSLSPGERATLSCRASQDISKYLNWYQQKPGQAPRLLIYHTSRLHSGIPARFSGSGSGTDYTLTISSLQPEDFAVYFCQQGNTLPYTFGQGTKLEIKHHHHHHHH

SEQ ID NO: 931 - DNA, 1473 bp, Artificial Sequence
  Description of Artificial Sequence: Synthetic polynucleotide
atggctctgcccgtgaccgcactcctcctgccactggctctgctgcttcacgccgctcgcccacaagtccagcttcaagaatcagggcctggtctggtgaagccatctgagactctgtccctcacttgcaccgtgagcggagtgtccctcccagactacggagtgagctggattagacagcctcccggaaagggactggagtggatcggagtgatttggggtagcgaaaccacttactatcaatcttccctgaagtcacgggtcaccatttcaaaggataactcaaagaatcaagtgagcctcaagctctcatcagtcaccgccgctgacaccgccgtgtattactgtgccaagcattactactatggagggtcctacgccatggactactggggccagggaactctggtcactgtgtcatctggtggaggaggtagcggaggaggcgggagcggtggaggtggctccggaggcggtgggtcagaaatcgtgatgacccagagccctgcaaccctgtccctttctcccggggaacgggctaccctttcttgtcgggcatcacaagatatctcaaaatacctcaattggtatcaacagaagccgggacaggcccctaggcttcttatctaccacacctctcgcctgcatagcgggattcccgcacgctttagcgggtctggaagcgggaccgactacactctgaccatctcatctctccagcccgaggacttcgccgtctacttctgccagcagggtaacaccctgccgtacaccttcggccagggcaccaagcttgagatcaaaaccactactcccgctccaaggccacccacccctgccccgaccatcgcctctcagccgctttccctgcgtccggaggcatgtagacccgcagctggtggggccgtgcatacccggggtcttgacttcgcctgcgatatctacatttgggcccctctggctggtacttgcggggtcctgctgctttcactcgtgatcactctttactgtaagcgcggtcggaagaagctgctgtacatctttaagcaacccttcatgaggcctgtgcagactactcaagaggaggacggctgttcatgccggttcccagaggaggaggaaggcggctgcgaactgcgcgtgaaattcagccgcagcgcagatgctccagcctacaagcaggggcagaaccagctctacaacgaactcaatcttggtcggagagaggagtacgacgtgctggacaagcggagaggacgggacccagaaatgggcgggaagccgcgcagaaagaatccccaagagggcctgtacaacgagctccaaaaggataagatggcagaagcctatagcgagattggtatgaaaggggaacgcagaagaggcaaaggccacgacggactgtaccagggactcagcaccgccaccaaggacacctatgacgctcttcacatgcaggccctgccgcctcgg

SEQ ID NO: 932 - protein, 491 aa, Artificial Sequence
  Description of Artificial Sequence: Synthetic polypeptide
MALPVTALLLPLALLLHAARPQVQLQESGPGLVKPSETLSLTCTVSGVSLPDYGVSWIRQPPGKGLEWIGVIWGSETTYYQSSLKSRVTISKDNSKNQVSLKLSSVTAADTAVYYCAKHYYYGGSYAMDYWGQGTLVTVSSGGGGSGGGGSGGGGSGGGGSEIVMTQSPATLSLSPGERATLSCRASQDISKYLNWYQQKPGQAPRLLIYHTSRLHSGIPARFSGSGSGTDYTLTISSLQPEDFAVYFCQQGNTLPYTFGQGTKLEIKTTTPAPRPPTPAPTIASQPLSLRPEACRPAAGGAVHTRGLDFACDIYIWAPLAGTCGVLLLSLVITLYCKRGRKKLLYIFKQPFMRPVQTTQEEDGCSCRFPEEEEGGCELRVKFSRSADAPAYKQGQNQLYNELNLGRREEYDVLDKRRGRDPEMGGKPRRKNPQEGLYNELQKDKMAEAYSEIGMKGERRRGKGHDGLYQGLSTATKDTYDALHMQALPPR

SEQ ID NO: 933 - protein, 247 aa, Artificial Sequence; identical to SEQ ID NO: 880
  Description of Artificial Sequence: Synthetic polypeptide

SEQ ID NO: 934 - DNA, 828 bp, Artificial Sequence
  Description of Artificial Sequence: Synthetic polynucleotide
atggccctcccagtgaccgctctgctgctgcctctcgcacttcttctccatgccgctcggcctgagatcgtcatgacccaaagccccgctaccctgtccctgtcacccggcgagagggcaaccctttcatgcagggccagccaggacatttctaagtacctcaactggtatcagcagaagccagggcaggctcctcgcctgctgatctaccacaccagccgcctccacagcggtatccccgccagattttccgggagcgggtctggaaccgactacaccctcaccatctcttctctgcagcccgaggatttcgccgtctatttctgccagcaggggaatactctgccgtacaccttcggtcaaggtaccaagctggaaatcaagggaggcggaggatcaggcggtggcggaagcggaggaggtggctccggaggaggaggttcccaagtgcagcttcaagaatcaggacccggacttgtgaagccatcagaaaccctctccctgacttgtaccgtgtccggtgtgagcctccccgactacggagtctcttggattcgccagcctccggggaagggtcttgaatggattggggtgatttggggatcagagactacttactacaattcatcacttaagtcacgggtcaccatcagcaaagataatagcaagaaccaagtgtcacttaagctgtcatctgtgaccgccgctgacaccgccgtgtactattgtgccaaacattactattacggagggtcttatgctatggactactggggacaggggaccctggtgactgtctctagccatcaccatcaccaccatcatcac

SEQ ID NO: 935 - protein, 276 aa, Artificial Sequence
  Description of Artificial Sequence: Synthetic polypeptide
MALPVTALLLPLALLLHAARPEIVMTQSPATLSLSPGERATLSCRASQDISKYLNWYQQKPGQAPRLLIYHTSRLHSGIPARFSGSGSGTDYTLTISSLQPEDFAVYFCQQGNTLPYTFGQGTKLEIKGGGGSGGGGSGGGGSGGGGSQVQLQESGPGLVKPSETLSLTCTVSGVSLPDYGVSWIRQPPGKGLEWIGVIWGSETTYYNSSLKSRVTISKDNSKNQVSLKLSSVTAADTAVYYCAKHYYYGGSYAMDYWGQGTLVTVSSHHHHHHHH

SEQ ID NO: 936 - DNA, 1473 bp, Artificial Sequence
  Description of Artificial Sequence: Synthetic polynucleotide
atggccctccctgtcaccgccctgctgcttccgctggctcttctgctccacgccgctcggcccgaaattgtgatgacccagtcacccgccactcttagcctttcacccggtgagcgcgcaaccctgtcttgcagagcctcccaagacatctcaaaataccttaattggtatcaacagaagcccggacaggctcctcgccttctgatctaccacaccagccggctccattctggaatccctgccaggttcagcggtagcggatctgggaccgactacaccctcactatcagctcactgcagccagaggacttcgctgtctatttctgtcagcaagggaacaccctgccctacacctttggacagggcaccaagctcgagattaaaggtggaggtggcagcggaggaggtgggtccggcggtggaggaagcggaggcggtgggagccaggtccaactccaagaaagcggaccgggtcttgtgaagccatcagaaactctttcactgacttgtactgtgagcggagtgtctctccccgattacggggtgtcttggatcagacagccaccggggaagggtctggaatggattggagtgatttggggctctgagactacttactacaactcatccctcaagtcacgcgtcaccatctcaaaggacaactctaagaatcaggtgtcactgaaactgtcatctgtgaccgcagccgacaccgccgtgtactattgcgctaagcattactattatggcgggagctacgcaatggattactggggacagggtactctggtcaccgtgtccagcaccactaccccagcaccgaggccacccaccccggctcctaccatcgcctcccagcctctgtccctgcgtccggaggcatgtagacccgcagctggtggggccgtgcatacccggggtcttgacttcgcctgcgatatctacatttgggcccctctggctggtacttgcggggtcctgctgctttcactcgtgatcactctttactgtaagcgcggtcggaagaagctgctgtacatctttaagcaacccttcatgaggcctgtgcagactactcaagaggaggacggctgttcatgccggttcccagaggaggaggaaggcggctgcgaactgcgcgtgaaattcagccgcagcgcagatgctccagcctacaagcaggggcagaaccagctctacaacgaactcaatcttggtcggagagaggagtacgacgtgctggacaagcggagaggacgggacccagaaatgggcgggaagccgcgcagaaagaatccccaagagggcctgtacaacgagctccaaaaggataagatggcagaagcctatagcgagattggtatgaaaggggaacgcagaagaggcaaaggccacgacggactgtaccagggactcagcaccgccaccaaggacacctatgacgctcttcacatgcaggccctgccgcctcgg

SEQ ID NO: 937 - protein, 491 aa, Artificial Sequence
  Description of Artificial Sequence: Synthetic polypeptide
MALPVTALLLPLALLLHAARPEIVMTQSPATLSLSPGERATLSCRASQDISKYLNWYQQKPGQAPRLLIYHTSRLHSGIPARFSGSGSGTDYTLTISSLQPEDFAVYFCQQGNTLPYTFGQGTKLEIKGGGGSGGGGSGGGGSGGGGSQVQLQESGPGLVKPSETLSLTCTVSGVSLPDYGVSWIRQPPGKGLEWIGVIWGSETTYYNSSLKSRVTISKDNSKNQVSLKLSSVTAADTAVYYCAKHYYYGGSYAMDYWGQGTLVTVSSTTTPAPRPPTPAPTIASQPLSLRPEACRPAAGGAVHTRGLDFACDIYIWAPLAGTCGVLLLSLVITLYCKRGRKKLLYIFKQPFMRPVQTTQEEDGCSCRFPEEEEGGCELRVKFSRSADAPAYKQGQNQLYNELNLGRREEYDVLDKRRGRDPEMGGKPRRKNPQEGLYNELQKDKMAEAYSEIGMKGERRRGKGHDGLYQGLSTATKDTYDALHMQALPPR

SEQ ID NO: 938 - protein, 247 aa, Artificial Sequence; identical to SEQ ID NO: 881
  Description of Artificial Sequence: Synthetic polypeptide

SEQ ID NO: 939 - DNA, 828 bp, Artificial Sequence
  Description of Artificial Sequence: Synthetic polynucleotide
atggcactgcctgtcactgccctcctgctgcctctggccctccttctgcatgccgccaggccccaagtccagctgcaagagtcaggacccggactggtgaagccgtctgagactctctcactgacttgtaccgtcagcggcgtgtccctccccgactacggagtgtcatggatccgccaacctcccgggaaagggcttgaatggattggtgtcatctggggttctgaaaccacctactacaactcttccctgaagtccagggtgaccatcagcaaggataattccaagaaccaggtcagccttaagctgtcatctgtgaccgctgctgacaccgccgtgtattactgcgccaagcactactattacggaggaagctacgctatggactattggggacagggcactctcgtgactgtgagcagcggcggtggagggtctggaggtggaggatccggtggtggtgggtcaggcggaggagggagcgagattgtgatgactcagtcaccagccaccctttctctttcacccggcgagagagcaaccctgagctgtagagccagccaggacatttctaagtacctcaactggtatcagcaaaaaccggggcaggcccctcgcctcctgatctaccatacctcacgccttcactctggtatccccgctcggtttagcggatcaggatctggtaccgactacactctgaccatttccagcctgcagccagaagatttcgcagtgtatttctgccagcagggcaatacccttccttacaccttcggtcagggaaccaagctcgaaatcaagcaccatcaccatcatcaccaccat

SEQ ID NO: 940 - protein, 276 aa, Artificial Sequence
  Description of Artificial Sequence: Synthetic polypeptide
MALPVTALLLPLALLLHAARPQVQLQESGPGLVKPSETLSLTCTVSGVSLPDYGVSWIRQPPGKGLEWIGVIWGSETTYYNSSLKSRVTISKDNSKNQVSLKLSSVTAADTAVYYCAKHYYYGGSYAMDYWGQGTLVTVSSGGGGSGGGGSGGGGSGGGGSEIVMTQSPATLSLSPGERATLSCRASQDISKYLNWYQQKPGQAPRLLIYHTSRLHSGIPARFSGSGSGTDYTLTISSLQPEDFAVYFCQQGNTLPYTFGQGTKLEIKHHHHHHHH

SEQ ID NO: 941 - DNA, 1473 bp, Artificial Sequence; identical to SEQ ID NO: 936
  Description of Artificial Sequence: Synthetic polynucleotide

SEQ ID NO: 942 - protein, 491 aa, Artificial Sequence; identical to SEQ ID NO: 937
  Description of Artificial Sequence: Synthetic polypeptide

SEQ ID NO: 943 - protein, 242 aa, Artificial Sequence; identical to SEQ ID NO: 882
  Description of Artificial Sequence: Synthetic polypeptide

SEQ ID NO: 944 - DNA, 813 bp, Artificial Sequence
  Description of Artificial Sequence: Synthetic polynucleotide
atggccctccctgtcaccgccctgctgcttccgctggctcttctgctccacgccgctcggcccgaaattgtgatgacccagtcacccgccactcttagcctttcacccggtgagcgcgcaaccctgtcttgcagagcctcccaagacatctcaaaataccttaattggtatcaacagaagcccggacaggctcctcgccttctgatctaccacaccagccggctccattctggaatccctgccaggttcagcggtagcggatctgggaccgactacaccctcactatcagctcactgcagccagaggacttcgctgtctatttctgtcagcaagggaacaccctgccctacacctttggacagggcaccaagctcgagattaaaggtggaggtggcagcggaggaggtgggtccggcggtggaggaagccaggtccaactccaagaaagcggaccgggtcttgtgaagccatcagaaactctttcactgacttgtactgtgagcggagtgtctctccccgattacggggtgtcttggatcagacagccaccggggaagggtctggaatggattggagtgatttggggctctgagactacttactacaattcatccctcaagtcacgcgtcaccatctcaaaggacaactctaagaatcaggtgtcactgaaactgtcatctgtgaccgcagccgacaccgccgtgtactattgcgctaagcattactattatggcgggagctacgcaatggattactggggacagggtactctggtcaccgtgtccagccaccaccatcatcaccatcaccat

SEQ ID NO: 945 - protein, 271 aa, Artificial Sequence
  Description of Artificial Sequence: Synthetic polypeptide
MALPVTALLLPLALLLHAARPEIVMTQSPATLSLSPGERATLSCRASQDISKYLNWYQQKPGQAPRLLIYHTSRLHSGIPARFSGSGSGTDYTLTISSLQPEDFAVYFCQQGNTLPYTFGQGTKLEIKGGGGSGGGGSGGGGSQVQLQESGPGLVKPSETLSLTCTVSGVSLPDYGVSWIRQPPGKGLEWIGVIWGSETTYYNSSLKSRVTISKDNSKNQVSLKLSSVTAADTAVYYCAKHYYYGGSYAMDYWGQGTLVTVSSHHHHHHHH

SEQ ID NO: 946 - DNA, 1473 bp, Artificial Sequence
  Description of Artificial Sequence: Synthetic polynucleotide
atggctctgcccgtgaccgcactcctcctgccactggctctgctgcttcacgccgctcgcccacaagtccagcttcaagaatcagggcctggtctggtgaagccatctgagactctgtccctcacttgcaccgtgagcggagtgtccctcccagactacggagtgagctggattagacagcctcccggaaagggactggagtggatcggagtgatttggggtagcgaaaccacttactataactcttccctgaagtcacgggtcaccatttcaaaggataactcaaagaatcaagtgagcctcaagctctcatcagtcaccgccgctgacaccgccgtgtattactgtgccaagcattactactatggagggtcctacgccatggactactggggccagggaactctggtcactgtgtcatctggtggaggaggtagcggaggaggcgggagcggtggaggtggctccggaggtggcggaagcgaaatcgtgatgacccagagccctgcaaccctgtccctttctcccggggaacgggctaccctttcttgtcgggcatcacaagatatctcaaaatacctcaattggtatcaacagaagccgggacaggcccctaggcttcttatctaccacacctctcgcctgcatagcgggattcccgcacgctttagcgggtctggaagcgggaccgactacactctgaccatctcatctctccagcccgaggacttcgccgtctacttctgccagcagggtaacaccctgccgtacaccttcggccagggcaccaagcttgagatcaaaaccactactcccgctccaaggccacccacccctgccccgaccatcgcctctcagccgctttccctgcgtccggaggcatgtagacccgcagctggtggggccgtgcatacccggggtcttgacttcgcctgcgatatctacatttgggcccctctggctggtacttgcggggtcctgctgctttcactcgtgatcactctttactgtaagcgcggtcggaagaagctgctgtacatctttaagcaacccttcatgaggcctgtgcagactactcaagaggaggacggctgttcatgccggttcccagaggaggaggaaggcggctgcgaactgcgcgtgaaattcagccgcagcgcagatgctccagcctacaagcaggggcagaaccagctctacaacgaactcaatcttggtcggagagaggagtacgacgtgctggacaagcggagaggacgggacccagaaatgggcgggaagccgcgcagaaagaatccccaagagggcctgtacaacgagctccaaaaggataagatggcagaagcctatagcgagattggtatgaaaggggaacgcagaagaggcaaaggccacgacggactgtaccagggactcagcaccgccaccaaggacacctatgacgctcttcacatgcaggccctgccgcctcgg

SEQ ID NO: 947 - protein, 491 aa, Artificial Sequence
  Description of Artificial Sequence: Synthetic polypeptide
MALPVTALLLPLALLLHAARPQVQLQESGPGLVKPSETLSLTCTVSGVSLPDYGVSWIRQPPGKGLEWIGVIWGSETTYYNSSLKSRVTISKDNSKNQVSLKLSSVTAADTAVYYCAKHYYYGGSYAMDYWGQGTLVTVSSGGGGSGGGGSGGGGSGGGGSEIVMTQSPATLSLSPGERATLSCRASQDISKYLNWYQQKPGQAPRLLIYHTSRLHSGIPARFSGSGSGTDYTLTISSLQPEDFAVYFCQQGNTLPYTFGQGTKLEIKTTTPAPRPPTPAPTIASQPLSLRPEACRPAAGGAVHTRGLDFACDIYIWAPLAGTCGVLLLSLVITLYCKRGRKKLLYIFKQPFMRPVQTTQEEDGCSCRFPEEEEGGCELRVKFSRSADAPAYKQGQNQLYNELNLGRREEYDVLDKRRGRDPEMGGKPRRKNPQEGLYNELQKDKMAEAYSEIGMKGERRRGKGHDGLYQGLSTATKDTYDALHMQALPPR

SEQ ID NO: 948 - protein, 242 aa, Artificial Sequence; identical to SEQ ID NO: 883
  Description of Artificial Sequence: Synthetic polypeptide

SEQ ID NO: 949 - DNA, 813 bp, Artificial Sequence
  Description of Artificial Sequence: Synthetic polynucleotide
atggctctgcccgtgaccgcactcctcctgccactggctctgctgcttcacgccgctcgcccacaagtccagcttcaagaatcagggcctggtctggtgaagccatctgagactctgtccctcacttgcaccgtgagcggagtgtccctcccagactacggagtgagctggattagacagcctcccggaaagggactggagtggatcggagtgatttggggtagcgaaaccacttactataactcttccctgaagtcacgggtcaccatttcaaaggataactcaaagaatcaagtgagcctcaagctctcatcagtcaccgccgctgacaccgccgtgtattactgtgccaagcattactactatggagggtcctacgccatggactactggggccagggaactctggtcactgtgtcatctggtggaggaggtagcggaggaggcgggagcggtggaggtggctccgaaatcgtgatgacccagagccctgcaaccctgtccctttctcccggggaacgggctaccctttcttgtcgggcatcacaagatatctcaaaatacctcaattggtatcaacagaagccgggacaggcccctaggcttcttatctaccacacctctcgcctgcatagcgggattcccgcacgctttagcgggtctggaagcgggaccgactacactctgaccatctcatctctccagcccgaggacttcgccgtctacttctgccagcagggtaacaccctgccgtacaccttcggccagggcaccaagcttgagatcaaacatcaccaccatcatcaccatcac

SEQ ID NO: 950 - protein, 271 aa, Artificial Sequence
  Description of Artificial Sequence: Synthetic polypeptide
MALPVTALLLPLALLLHAARPQVQLQESGPGLVKPSETLSLTCTVSGVSLPDYGVSWIRQPPGKGLEWIGVIWGSETTYYNSSLKSRVTISKDNSKNQVSLKLSSVTAADTAVYYCAKHYYYGGSYAMDYWGQGTLVTVSSGGGGSGGGGSGGGGSEIVMTQSPATLSLSPGERATLSCRASQDISKYLNWYQQKPGQAPRLLIYHTSRLHSGIPARFSGSGSGTDYTLTISSLQPEDFAVYFCQQGNTLPYTFGQGTKLEIKHHHHHHHH

SEQ ID NO: 951 - DNA, 1458 bp, Artificial Sequence
  Description of Artificial Sequence: Synthetic polynucleotide
atggccctccctgtcaccgccctgctgcttccgctggctcttctgctccacgccgctcggcccgaaattgtgatgacccagtcacccgccactcttagcctttcacccggtgagcgcgcaaccctgtcttgcagagcctcccaagacatctcaaaataccttaattggtatcaacagaagcccggacaggctcctcgccttctgatctaccacaccagccggctccattctggaatccctgccaggttcagcggtagcggatctgggaccgactacaccctcactatcagctcactgcagccagaggacttcgctgtctatttctgtcagcaagggaacaccctgccctacacctttggacagggcaccaagctcgagattaaaggtggaggtggcagcggaggaggtgggtccggcggtggaggaagccaggtccaactccaagaaagcggaccgggtcttgtgaagccatcagaaactctttcactgacttgtactgtgagcggagtgtctctccccgattacggggtgtcttggatcagacagccaccggggaagggtctggaatggattggagtgatttggggctctgagactacttactacaactcatccctcaagtcacgcgtcaccatctcaaaggacaactctaagaatcaggtgtcactgaaactgtcatctgtgaccgcagccgacaccgccgtgtactattgcgctaagcattactattatggcgggagctacgcaatggattactggggacagggtactctggtcaccgtgtccagcaccactaccccagcaccgaggccacccaccccggctcctaccatcgcctcccagcctctgtccctgcgtccggaggcatgtagacccgcagctggtggggccgtgcatacccggggtcttgacttcgcctgcgatatctacatttgggcccctctggctggtacttgcggggtcctgctgctttcactcgtgatcactctttactgtaagcgcggtcggaagaagctgctgtacatctttaagcaacccttcatgaggcctgtgcagactactcaagaggaggacggctgttcatgccggttcccagaggaggaggaaggcggctgcgaactgcgcgtgaaattcagccgcagcgcagatgctccagcctacaagcaggggcagaaccagctctacaacgaactcaatcttggtcggagagaggagtacgacgtgctggacaagcggagaggacgggacccagaaatgggcgggaagccgcgcagaaagaatccccaagagggcctgtacaacgagctccaaaaggataagatggcagaagcctatagcgagattggtatgaaaggggaacgcagaagaggcaaaggccacgacggactgtaccagggactcagcaccgccaccaaggacacctatgacgctcttcacatgcaggccctgccgcctcgg

SEQ ID NO: 952 - protein, 486 aa, Artificial Sequence
  Description of Artificial Sequence: Synthetic polypeptide
MALPVTALLLPLALLLHAARPEIVMTQSPATLSLSPGERATLSCRASQDISKYLNWYQQKPGQAPRLLIYHTSRLHSGIPARFSGSGSGTDYTLTISSLQPEDFAVYFCQQGNTLPYTFGQGTKLEIKGGGGSGGGGSGGGGSQVQLQESGPGLVKPSETLSLTCTVSGVSLPDYGVSWIRQPPGKGLEWIGVIWGSETTYYNSSLKSRVTISKDNSKNQVSLKLSSVTAADTAVYYCAKHYYYGGSYAMDYWGQGTLVTVSSTTTPAPRPPTPAPTIASQPLSLRPEACRPAAGGAVHTRGLDFACDIYIWAPLAGTCGVLLLSLVITLYCKRGRKKLLYIFKQPFMRPVQTTQEEDGCSCRFPEEEEGGCELRVKFSRSADAPAYKQGQNQLYNELNLGRREEYDVLDKRRGRDPEMGGKPRRKNPQEGLYNELQKDKMAEAYSEIGMKGERRRGKGHDGLYQGLSTATKDTYDALHMQALPPR

SEQ ID NO: 953 - DNA, 813 bp, Artificial Sequence
  Description of Artificial Sequence: Synthetic polynucleotide
atggccctgcccgtcaccgctctgctgctgccccttgctctgcttcttcatgcagcaaggccggacatccagatgacccaaaccacctcatccctctctgcctctcttggagacagggtgaccatttcttgtcgcgccagccaggacatcagcaagtatctgaactggtatcagcagaagccggacggaaccgtgaagctcctgatctaccatacctctcgcctgcatagcggcgtgccctcacgcttctctggaagcggatcaggaaccgattattctctcactatttcaaatcttgagcaggaagatattgccacctatttctgccagcagggtaataccctgccctacaccttcggaggagggaccaagctcgaaatcaccggtggaggaggcagcggcggtggagggtctggtggaggtggttctgaggtgaagctgcaagaatcaggccctggacttgtggccccttcacagtccctgagcgtgacttgcaccgtgtccggagtctccctgcccgactacggagtgtcatggatcagacaacctccacggaaaggactggaatggctcggtgtcatctggggtagcgaaactacttactacaattcagccctcaaaagcaggctgactattatcaaggacaacagcaagtcccaagtctttcttaagatgaactcactccagactgacgacaccgcaatctactattgtgctaagcactactactacggaggatcctacgctatggattactggggacaaggtacttccgtcactgtctcttcacaccatcatcaccatcaccatcac

SEQ ID NO: 954 - protein, 271 aa, Artificial Sequence
  Description of Artificial Sequence: Synthetic polypeptide
MALPVTALLLPLALLLHAARPDIQMTQTTSSLSASLGDRVTISCRASQDISKYLNWYQQKPDGTVKLLIYHTSRLHSGVPSRFSGSGSGTDYSLTISNLEQEDIATYFCQQGNTLPYTFGGGTKLEITGGGGSGGGGSGGGGSEVKLQESGPGLVAPSQSLSVTCTVSGVSLPDYGVSWIRQPPRKGLEWLGVIWGSETTYYNSALKSRLTIIKDNSKSQVFLKMNSLQTDDTAIYYCAKHYYYGGSYAMDYWGQGTSVTVSSHHHHHHHH

SEQ ID NO: 955 - DNA, 1458 bp, Artificial Sequence
  Description of Artificial Sequence: Synthetic polynucleotide
atggccttaccagtgaccgccttgctcctgccgctggccttgctgctccacgccgccaggccggacatccagatgacacagactacatcctccctgtctgcctctctgggagacagagtcaccatcagttgcagggcaagtcaggacattagtaaatatttaaattggtatcagcagaaaccagatggaactgttaaactcctgatctaccatacatcaagattacactcaggagtcccatcaaggttcagtggcagtgggtctggaacagattattctctcaccattagcaacctggagcaagaagatattgccacttacttttgccaacagggtaatacgcttccgtacacgttcggaggggggaccaagctggagatcacaggtggcggtggctcgggcggtggtgggtcgggtggcggcggatctgaggtgaaactgcaggagtcaggacctggcctggtggcgccctcacagagcctgtccgtcacatgcactgtctcaggggtctcattacccgactatggtgtaagctggattcgccagcctccacgaaagggtctggagtggctgggagtaatatggggtagtgaaaccacatactataattcagctctcaaatccagactgaccatcatcaaggacaactccaagagccaagttttcttaaaaatgaacagtctgcaaactgatgacacagccatttactactgtgccaaacattattactacggtggtagctatgctatggactactggggccaaggaacctcagtcaccgtctcctcaaccacgacgccagcgccgcgaccaccaacaccggcgcccaccatcgcgtcgcagcccctgtccctgcgcccagaggcgtgccggccagcggcggggggcgcagtgcacacgagggggctggacttcgcctgtgatatctacatctgggcgcccttggccgggacttgtggggtccttctcctgtcactggttatcaccctttactgcaaacggggcagaaagaaactcctgtatatattcaaacaaccatttatgagaccagtacaaactactcaagaggaagatggctgtagctgccgatttccagaagaagaagaaggaggatgtgaactgagagtgaagttcagcaggagcgcagacgcccccgcgtacaagcagggccagaaccagctctataacgagctcaatctaggacgaagagaggagtacgatgttttggacaagagacgtggccgggaccctgagatggggggaaagccgagaaggaagaaccctcaggaaggcctgtacaatgaactgcagaaagataagatggcggaggcctacagtgagattgggatgaaaggcgagcgccggaggggcaaggggcacgatggcctttaccagggtctcagtacagccaccaaggacacctacgacgcccttcacatgcaggccctgccccctcgc

SEQ ID NO: 956 - protein, 486 aa, Artificial Sequence; identical to SEQ ID NO: 891
  Description of Artificial Sequence: Synthetic polypeptide

SEQ ID NO: 957 - protein, 242 aa, Artificial Sequence; identical to SEQ ID NO: 884
  Description of Artificial Sequence: Synthetic polypeptide

SEQ ID NO: 958 - protein, 5 aa, Artificial Sequence
  Description of Artificial Sequence: Synthetic peptide
DYGVS

SEQ ID NO: 959 - protein, 16 aa, Artificial Sequence
  Description of Artificial Sequence: Synthetic peptide
VIWGSETTYYNSALKS

SEQ ID NO: 960 - protein, 12 aa, Artificial Sequence
  Description of Artificial Sequence: Synthetic peptide
HYYYGGSYAMDY

SEQ ID NO: 961 - protein, 16 aa, Artificial Sequence
  Description of Artificial Sequence: Synthetic peptide
VIWGSETTYYSSSLKS

SEQ ID NO: 962 - protein, 16 aa, Artificial Sequence
  Description of Artificial Sequence: Synthetic peptide
VIWGSETTYYQSSLKS

SEQ ID NO: 963 - protein, 16 aa, Artificial Sequence
  Description of Artificial Sequence: Synthetic peptide
VIWGSETTYYNSSLKS

SEQ ID NO: 964 - protein, 11 aa, Artificial Sequence
  Description of Artificial Sequence: Synthetic peptide
RASQDISKYLN

SEQ ID NO: 965 - protein, 7 aa, Artificial Sequence
  Description of Artificial Sequence: Synthetic peptide
HTSRLHS

SEQ ID NO: 966 - protein, 9 aa, Artificial Sequence
  Description of Artificial Sequence: Synthetic peptide
QQGNTLPYT

SEQ ID NO: 967 - protein, 239 aa, Artificial Sequence
  Description of Artificial Sequence: Synthetic polypeptide
EVQLVESGGGLVQPGGSLRLSCAVSGFALSNHGMSWVRRAPGKGLEWVSGIVYSGSTYYAASVKGRFTISRDNSRNTLYLQMNSLRPEDTAIYYCSAHGGESDVWGQGTTVTVSSASGGGGSGGRASGGGGSDIQLTQSPSSLSASVGDRVTITCRASQSISSYLNWYQQKPGKAPKLLIYAASSLQSGVPSRFSGSGSGTDFTLTISSLQPEDFATYYCQQSYSTPYTFGQGTKVEIK

SEQ ID NO: 968 - DNA, 717 bp, Artificial Sequence
  Description of Artificial Sequence: Synthetic polynucleotide
gaagtgcaattggtggaatcagggggaggacttgtgcagcctggaggatcgctgagactgtcatgtgccgtgtccggctttgccctgtccaaccacgggatgtcctgggtccgccgcgcgcctggaaagggcctcgaatgggtgtcgggtattgtgtacagcggtagcacctactatgccgcatccgtgaaggggagattcaccatcagccgggacaactccaggaacactctgtacctccaaatgaattcgctgaggccagaggacactgccatctactactgctccgcgcatggcggagagtccgacgtctggggacaggggaccaccgtgaccgtgtctagcgcgtccggcggaggcggcagcgggggtcgggcatcagggggcggcggatcggacatccagctcacccagtccccgagctcgctgtccgcctccgtgggagatcgggtcaccatcacgtgccgcgccagccagtcgatttcctcctacctgaactggtaccaacagaagcccggaaaagccccgaagcttctcatctacgccgcctcgagcctgcagtcaggagtgccctcacggttctccggctccggttccggtactgatttcaccctgaccatttcctccctgcaaccggaggacttcgctacttactactgccagcagtcgtactccaccccctacactttcggacaaggcaccaaggtcgaaatcaag

SEQ ID NO: 969 - protein, 115 aa, Artificial Sequence
  Description of Artificial Sequence: Synthetic polypeptide
EVQLVESGGGLVQPGGSLRLSCAVSGFALSNHGMSWVRRAPGKGLEWVSGIVYSGSTYYAASVKGRFTISRDNSRNTLYLQMNSLRPEDTAIYYCSAHGGESDVWGQGTTVTVSS

SEQ ID NO: 970 - protein, 107 aa, Artificial Sequence
  Description of Artificial Sequence: Synthetic polypeptide
DIQLTQSPSSLSASVGDRVTITCRASQSISSYLNWYQQKPGKAPKLLIYAASSLQSGVPSRFSGSGSGTDFTLTISSLQPEDFATYYCQQSYSTPYTFGQGTKVEIK

SEQ ID NO: 971 - protein, 483 aa, Artificial Sequence
  Description of Artificial Sequence: Synthetic polypeptide
MALPVTALLLPLALLLHAARPEVQLVESGGGLVQPGGSLRLSCAVSGFALSNHGMSWVRRAPGKGLEWVSGIVYSGSTYYAASVKGRFTISRDNSRNTLYLQMNSLRPEDTAIYYCSAHGGESDVWGQGTTVTVSSASGGGGSGGRASGGGGSDIQLTQSPSSLSASVGDRVTITCRASQSISSYLNWYQQKPGKAPKLLIYAASSLQSGVPSRFSGSGSGTDFTLTISSLQPEDFATYYCQQSYSTPYTFGQGTKVEIKTTTPAPRPPTPAPTIASQPLSLRPEACRPAAGGAVHTRGLDFACDIYIWAPLAGTCGVLLLSLVITLYCKRGRKKLLYIFKQPFMRPVQTTQEEDGCSCRFPEEEEGGCELRVKFSRSADAPAYKQGQNQLYNELNLGRREEYDVLDKRRGRDPEMGGKPRRKNPQEGLYNELQKDKMAEAYSEIGMKGERRRGKGHDGLYQGLSTATKDTYDALHMQALPPR

SEQ ID NO: 972 - DNA, 1449 bp, Artificial Sequence
  Description of Artificial Sequence: Synthetic polynucleotide
atggccctccctgtcaccgccctgctgcttccgctggctcttctgctccacgccgctcggcccgaagtgcaattggtggaatcagggggaggacttgtgcagcctggaggatcgctgagactgtcatgtgccgtgtccggctttgccctgtccaaccacgggatgtcctgggtccgccgcgcgcctggaaagggcctcgaatgggtgtcgggtattgtgtacagcggtagcacctactatgccgcatccgtgaaggggagattcaccatcagccgggacaactccaggaacactctgtacctccaaatgaattcgctgaggccagaggacactgccatctactactgctccgcgcatggcggagagtccgacgtctggggacaggggaccaccgtgaccgtgtctagcgcgtccggcggaggcggcagcgggggtcgggcatcagggggcggcggatcggacatccagctcacccagtccccgagctcgctgtccgcctccgtgggagatcgggtcaccatcacgtgccgcgccagccagtcgatttcctcctacctgaactggtaccaacagaagcccggaaaagccccgaagcttctcatctacgccgcctcgagcctgcagtcaggagtgccctcacggttctccggctccggttccggtactgatttcaccctgaccatttcctccctgcaaccggaggacttcgctacttactactgccagcagtcgtactccaccccctacactttcggacaaggcaccaaggtcgaaatcaagaccactaccccagcaccgaggccacccaccccggctcctaccatcgcctcccagcctctgtccctgcgtccggaggcatgtagacccgcagctggtggggccgtgcatacccggggtcttgacttcgcctgcgatatctacatttgggcccctctggctggtacttgcggggtcctgctgctttcactcgtgatcactctttactgtaagcgcggtcggaagaagctgctgtacatctttaagcaacccttcatgaggcctgtgcagactactcaagaggaggacggctgttcatgccggttcccagaggaggaggaaggcggctgcgaactgcgcgtgaaattcagccgcagcgcagatgctccagcctacaagcaggggcagaaccagctctacaacgaactcaatcttggtcggagagaggagtacgacgtgctggacaagcggagaggacgggacccagaaatgggcgggaagccgcgcagaaagaatccccaagagggcctgtacaacgagctccaaaaggataagatggcagaagcctatagcgagattggtatgaaaggggaacgcagaagaggcaaaggccacgacggactgtaccagggactcagcaccgccaccaaggacacctatgacgctcttcacatgcaggccctgccgcctcgg

SEQ ID NO: 973 - protein, 246 aa, Artificial Sequence
  Description of Artificial Sequence: Synthetic polypeptide
QVQLVESGGGLVQPGRSLRLSCAASGFTFSNYAMSWVRQAPGKGLGWVSGISRSGENTYYADSVKGRFTISRDNSKNTLYLQMNSLRDEDTAVYYCARSPAHYYGGMDVWGQGTTVTVSSASGGGGSGGRASGGGGSDIVLTQSPGTLSLSPGERATLSCRASQSISSSFLAWYQQKPGQAPRLLIYGASRRATGIPDRFSGSGSGTDFTLTISRLEPEDSAVYYCQQYHSSPSWTFGQGTKLEIK

SEQ ID NO: 974 - DNA, 738 bp, Artificial Sequence
  Description of Artificial Sequence: Synthetic polynucleotide
caagtgcaactcgtggaatctggtggaggactcgtgcaacccggaagatcgcttagactgtcgtgtgccgccagcgggttcactttctcgaactacgcgatgtcctgggtccgccaggcacccggaaagggactcggttgggtgtccggcatttcccggtccggcgaaaatacctactacgccgactccgtgaagggccgcttcaccatctcaagggacaacagcaaaaacaccctgtacttgcaaatgaactccctgcgggatgaagatacagccgtgtactattgcgcccggtcgcctgcccattactacggcggaatggacgtctggggacagggaaccactgtgactgtcagcagcgcgtcgggtggcggcggctcagggggtcgggcctccggggggggagggtccgacatcgtgctgacccagtccccgggaaccctgagcctgagcccgggagagcgcgcgaccctgtcatgccgggcatcccagagcattagctcctcctttctcgcctggtatcagcagaagcccggacaggccccgaggctgctgatctacggcgctagcagaagggctaccggaatcccagaccggttctccggctccggttccgggaccgatttcacccttactatctcgcgcctggaacctgaggactccgccgtctactactgccagcagtaccactcatccccgtcgtggacgttcggacagggcaccaagctggagattaag

SEQ ID NO: 975 - protein, 120 aa, Artificial Sequence
  Description of Artificial Sequence: Synthetic polypeptide
QVQLVESGGGLVQPGRSLRLSCAASGFTFSNYAMSWVRQAPGKGLGWVSGISRSGENTYYADSVKGRFTISRDNSKNTLYLQMNSLRDEDTAVYYCARSPAHYYGGMDVWGQGTTVTVSS

SEQ ID NO: 976 - protein, 109 aa, Artificial Sequence
  Description of Artificial Sequence: Synthetic polypeptide
DIVLTQSPGTLSLSPGERATLSCRASQSISSSFLAWYQQKPGQAPRLLIYGASRRATGIPDRFSGSGSGTDFTLTISRLEPEDSAVYYCQQYHSSPSWTFGQGTKLEIK

SEQ ID NO: 977 - protein, 490 aa, Artificial Sequence
  Description of Artificial Sequence: Synthetic polypeptide
MALPVTALLLPLALLLHAARPQVQLVESGGGLVQPGRSLRLSCAASGFTFSNYAMSWVRQAPGKGLGWVSGISRSGENTYYADSVKGRFTISRDNSKNTLYLQMNSLRDEDTAVYYCARSPAHYYGGMDVWGQGTTVTVSSASGGGGSGGRASGGGGSDIVLTQSPGTLSLSPGERATLSCRASQSISSSFLAWYQQKPGQAPRLLIYGASRRATGIPDRFSGSGSGTDFTLTISRLEPEDSAVYYCQQYHSSPSWTFGQGTKLEIKTTTPAPRPPTPAPTIASQPLSLRPEACRPAAGGAVHTRGLDFACDIYIWAPLAGTCGVLLLSLVITLYCKRGRKKLLYIFKQPFMRPVQTTQEEDGCSCRFPEEEEGGCELRVKFSRSADAPAYKQGQNQLYNELNLGRREEYDVLDKRRGRDPEMGGKPRRKNPQEGLYNELQKDKMAEAYSEIGMKGERRRGKGHDGLYQGLSTATKDTYDALHMQALPPR

SEQ ID NO: 978 - DNA, 1470 bp, Artificial Sequence
  Description of Artificial Sequence: Synthetic polynucleotide
atggccctccctgtcaccgccctgctgcttccgctggctcttctgctccacgccgctcggccccaagtgcaactcgtggaatctggtggaggactcgtgcaacccggaagatcgcttagactgtcgtgtgccgccagcgggttcactttctcgaactacgcgatgtcctgggtccgccaggcacccggaaagggactcggttgggtgtccggcatttcccggtccggcgaaaatacctactacgccgactccgtgaagggccgcttcaccatctcaagggacaacagcaaaaacaccctgtacttgcaaatgaactccctgcgggatgaagatacagccgtgtactattgcgcccggtcgcctgcccattactacggcggaatggacgtctggggacagggaaccactgtgactgtcagcagcgcgtcgggtggcggcggctcagggggtcgggcctccggggggggagggtccgacatcgtgctgacccagtccccgggaaccctgagcctgagcccgggagagcgcgcgaccctgtcatgccgggcatcccagagcattagctcctcctttctcgcctggtatcagcagaagcccggacaggccccgaggctgctgatctacggcgctagcagaagggctaccggaatcccagaccggttctccggctccggttccgggaccgatttcacccttactatctcgcgcctggaacctgaggactccgccgtctactactgccagcagtaccactcatccccgtcgtggacgttcggacagggcaccaagctggagattaagaccactaccccagcaccgaggccacccaccccggctcctaccatcgcctcccagcctctgtccctgcgtccggaggcatgtagacccgcagctggtggggccgtgcatacccggggtcttgacttcgcctgcgatatctacatttgggcccctctggctggtacttgcggggtcctgctgctttcactcgtgatcactctttactgtaagcgcggtcggaagaagctgctgtacatctttaagcaacccttcatgaggcctgtgcagactactcaagaggaggacggctgttcatgccggttcccagaggaggaggaaggcggctgcgaactgcgcgtgaaattcagccgcagcgcagatgctccagcctacaagcaggggcagaaccagctctacaacgaactcaatcttggtcggagagaggagtacgacgtgctggacaagcggagaggacgggacccagaaatgggcgggaagccgcgcagaaagaatccccaagagggcctgtacaacgagctccaaaaggataagatggcagaagcctatagcgagattggtatgaaaggggaacgcagaagaggcaaaggccacgacggactgtaccagggactcagcaccgccaccaaggacacctatgacgctcttcacatgcaggccctgccgcctcgg

SEQ ID NO: 979 - protein, 244 aa, Artificial Sequence
  Description of Artificial Sequence: Synthetic polypeptide
QVQLVESGGGLVQPGRSLRLSCAASGFTFDDYAMHWVRQAPGKGLEWVSGISWNSGSIGYADSVKGRFTISRDNAKNSLYLQMNSLRAEDTALYYCSVHSFLAYWGQGTLVTVSSASGGGGSGGRASGGGGSDIVMTQTPLSLPVTPGEPASISCRSSQSLLHSNGYNYLDWYLQKPGQSPQLLIYLGSNRASGVPDRFSGSGSGTDFTLKISRVEAEDVGVYYCMQALQTPYTFGQGTKVEIK

SEQ ID NO: 980 - DNA, 732 bp, Artificial Sequence
  Description of Artificial Sequence: Synthetic polynucleotide
caagtgcaactcgtcgaatccggtggaggtctggtccaacctggtagaagcctgagactgtcgtgtgcggccagcggattcacctttgatgactatgctatgcactgggtgcggcaggccccaggaaagggcctggaatgggtgtcgggaattagctggaactccgggtccattggctacgccgactccgtgaagggccgcttcaccatctcccgcgacaacgcaaagaactccctgtacttgcaaatgaactcgctcagggctgaggataccgcgctgtactactgctccgtgcattccttcctggcctactggggacagggaactctggtcaccgtgtcgagcgcctccggcggcgggggctcgggtggacgggcctcgggcggaggggggtccgacatcgtgatgacccagaccccgctgagcttgcccgtgactcccggagagcctgcatccatctcctgccggtcatcccagtcccttctccactccaacggatacaactacctcgactggtacctccagaagccgggacagagccctcagcttctgatctacctggggtcaaatagagcctcaggagtgccggatcggttcagcggatctggttcgggaactgatttcactctgaagatttcccgcgtggaagccgaggacgtgggcgtctactactgtatgcaggcgctgcagaccccctataccttcggccaagggacgaaagtggagatcaag

SEQ ID NO: 981 - protein, 115 aa, Artificial Sequence
  Description of Artificial Sequence: Synthetic polypeptide
QVQLVESGGGLVQPGRSLRLSCAASGFTFDDYAMHWVRQAPGKGLEWVSGISWNSGSIGYADSVKGRFTISRDNAKNSLYLQMNSLRAEDTALYYCSVHSFLAYWGQGTLVTVSS

SEQ ID NO: 982 - protein, 112 aa, Artificial Sequence
  Description of Artificial Sequence: Synthetic polypeptide
DIVMTQTPLSLPVTPGEPASISCRSSQSLLHSNGYNYLDWYLQKPGQSPQLLIYLGSNRASGVPDRFSGSGSGTDFTLKISRVEAEDVGVYYCMQALQTPYTFGQGTKVEIK

SEQ ID NO: 983 - protein, 488 aa, Artificial Sequence
  Description of Artificial Sequence: Synthetic polypeptide
MALPVTALLLPLALLLHAARPQVQLVESGGGLVQPGRSLRLSCAASGFTFDDYAMHWVRQAPGKGLEWVSGISWNSGSIGYADSVKGRFTISRDNAKNSLYLQMNSLRAEDTALYYCSVHSFLAYWGQGTLVTVSSASGGGGSGGRASGGGGSDIVMTQTPLSLPVTPGEPASISCRSSQSLLHSNGYNYLDWYLQKPGQSPQLLIYLGSNRASGVPDRFSGSGSGTDFTLKISRVEAEDVGVYYCMQALQTPYTFGQGTKVEIKTTTPAPRPPTPAPTIASQPLSLRPEACRPAAGGAVHTRGLDFACDIYIWAPLAGTCGVLLLSLVITLYCKRGRKKLLYIFKQPFMRPVQTTQEEDGCSCRFPEEEEGGCELRVKFSRSADAPAYKQGQNQLYNELNLGRREEYDVLDKRRGRDPEMGGKPRRKNPQEGLYNELQKDKMAEAYSEIGMKGERRRGKGHDGLYQGLSTATKDTYDALHMQALPPR

SEQ ID NO: 984 - DNA, 1464 bp, Artificial Sequence
  Description of Artificial Sequence: Synthetic polynucleotide
atggccctccctgtcaccgccctgctgcttccgctggctcttctgctccacgccgctcggccccaagtgcaactcgtcgaatccggtggaggtctggtccaacctggtagaagcctgagactgtcgtgtgcggccagcggattcacctttgatgactatgctatgcactgggtgcggcaggccccaggaaagggcctggaatgggtgtcgggaattagctggaactccgggtccattggctacgccgactccgtgaagggccgcttcaccatctcccgcgacaacgcaaagaactccctgtacttgcaaatgaactcgctcagggctgaggataccgcgctgtactactgctccgtgcattccttcctggcctactggggacagggaactctggtcaccgtgtcgagcgcctccggcggcgggggctcgggtggacgggcctcgggcggaggggggtccgacatcgtgatgacccagaccccgctgagcttgcccgtgactcccggagagcctgcatccatctcctgccggtcatcccagtcccttctccactccaacggatacaactacctcgactggtacctccagaagccgggacagagccctcagcttctgatctacctggggtcaaatagagcctcaggagtgccggatcggttcagcggatctggttcgggaactgatttcactctgaagatttcccgcgtggaagccgaggacgtgggcgtctactactgtatgcaggcgctgcagaccccctataccttcggccaagggacgaaagtggagatcaagaccactaccccagcaccgaggccacccaccccggctcctaccatcgcctcccagcctctgtccctgcgtccggaggcatgtagacccgcagctggtggggccgtgcatacccggggtcttgacttcgcctgcgatatctacatttgggcccctctggctggtacttgcggggtcctgctgctttcactcgtgatcactctttactgtaagcgcggtcggaagaagctgctgtacatctttaagcaacccttcatgaggcctgtgcagactactcaagaggaggacggctgttcatgccggttcccagaggaggaggaaggcggctgcgaactgcgcgtgaaattcagccgcagcgcagatgctccagcctacaagcaggggcagaaccagctctacaacgaactcaatcttggtcggagagaggagtacgacgtgctggacaagcggagaggacgggacccagaaatgggcgggaagccgcgcagaaagaatccccaagagggcctgtacaacgagctccaaaaggataagatggcagaagcctatagcgagattggtatgaaaggggaacgcagaagaggcaaaggccacgacggactgtaccagggactcagcaccgccaccaaggacacctatgacgctcttcacatgcaggccctgccgcctcgg

SEQ ID NO: 985 - protein, 243 aa, Artificial Sequence
  Description of Artificial Sequence: Synthetic polypeptide
EVQLLESGGGLVQPGGSLRLSCAVSGFALSNHGMSWVRRAPGKGLEWVSGIVYSGSTYYAASVKGRFTISRDNSRNTLYLQMNSLRPEDTAIYYCSAHGGESDVWGQGTTVTVSSASGGGGSGGRASGGGGSDIVMTQTPLSLSVTPGQPASISCKSSQSLLRNDGKTPLYWYLQKAGQPPQLLIYEVSNRFSGVPDRFSGSGSGTDFTLKISRVEAEDVGAYYCMQNIQFPSFGGGTKLEIK

SEQ ID NO: 986 - DNA, 729 bp, Artificial Sequence
  Description of Artificial Sequence: Synthetic polynucleotide
gaagtgcaattgttggaatctggaggaggacttgtgcagcctggaggatcactgagactttcgtgtgcggtgtcaggcttcgccctgagcaaccacggcatgagctgggtgcggagagccccggggaagggtctggaatgggtgtccgggatcgtctactccggttcaacttactacgccgcaagcgtgaagggtcgcttcaccatttcccgcgataactcccggaacaccctgtacctccaaatgaactccctgcggcccgaggacaccgccatctactactgttccgcgcatggaggagagtccgatgtctggggacagggcactaccgtgaccgtgtcgagcgcctcggggggaggaggctccggcggtcgcgcctccggggggggtggcagcgacattgtgatgacgcagactccactctcgctgtccgtgaccccgggacagcccgcgtccatctcgtgcaagagctcccagagcctgctgaggaacgacggaaagactcctctgtattggtacctccagaaggctggacagcccccgcaactgctcatctacgaagtgtcaaatcgcttctccggggtgccggatcggttttccggctcgggatcgggcaccgacttcaccctgaaaatctccagggtcgaggccgaggacgtgggagcctactactgcatgcaaaacatccagttcccttccttcggcggcggcacaaagctggagattaag

SEQ ID NO: 987 - protein, 115 aa, Artificial Sequence
  Description of Artificial Sequence: Synthetic polypeptide
EVQLLESGGGLVQPGGSLRLSCAVSGFALSNHGMSWVRRAPGKGLEWVSGIVYSGSTYYAASVKGRFTISRDNSRNTLYLQMNSLRPEDTAIYYCSAHGGESDVWGQGTTVTVSS

SEQ ID NO: 988 - protein, 111 aa, Artificial Sequence
  Description of Artificial Sequence: Synthetic polypeptide
DIVMTQTPLSLSVTPGQPASISCKSSQSLLRNDGKTPLYWYLQKAGQPPQLLIYEVSNRFSGVPDRFSGSGSGTDFTLKISRVEAEDVGAYYCMQNIQFPSFGGGTKLEIK

SEQ ID NO: 989 - protein, 487 aa, Artificial Sequence
  Description of Artificial Sequence: Synthetic polypeptide
MALPVTALLLPLALLLHAARPEVQLLESGGGLVQPGGSLRLSCAVSGFALSNHGMSWVRRAPGKGLEWVSGIVYSGSTYYAASVKGRFTISRDNSRNTLYLQMNSLRPEDTAIYYCSAHGGESDVWGQGTTVTVSSASGGGGSGGRASGGGGSDIVMTQTPLSLSVTPGQPASISCKSSQSLLRNDGKTPLYWYLQKAGQPPQLLIYEVSNRFSGVPDRFSGSGSGTDFTLKISRVEAEDVGAYYCMQNIQFPSFGGGTKLEIKTTTPAPRPPTPAPTIASQPLSLRPEACRPAAGGAVHTRGLDFACDIYIWAPLAGTCGVLLLSLVITLYCKRGRKKLLYIFKQPFMRPVQTTQEEDGCSCRFPEEEEGGCELRVKFSRSADAPAYKQGQNQLYNELNLGRREEYDVLDKRRGRDPEMGGKPRRKNPQEGLYNELQKDKMAEAYSEIGMKGERRRGKGHDGLYQGLSTATKDTYDALHMQALPPR

SEQ ID NO: 990 - DNA, 1461 bp, Artificial Sequence
  Description of Artificial Sequence: Synthetic polynucleotide
atggccctccctgtcaccgccctgctgcttccgctggctcttctgctccacgccgctcggcccgaagtgcaattgttggaatctggaggaggacttgtgcagcctggaggatcactgagactttcgtgtgcggtgtcaggcttcgccctgagcaaccacggcatgagctgggtgcggagagccccggggaagggtctggaatgggtgtccgggatcgtctactccggttcaacttactacgccgcaagcgtgaagggtcgcttcaccatttcccgcgataactcccggaacaccctgtacctccaaatgaactccctgcggcccgaggacaccgccatctactactgttccgcgcatggaggagagtccgatgtctggggacagggcactaccgtgaccgtgtcgagcgcctcggggggaggaggctccggcggtcgcgcctccggggggggtggcagcgacattgtgatgacgcagactccactctcgctgtccgtgaccccgggacagcccgcgtccatctcgtgcaagagctcccagagcctgctgaggaacgacggaaagactcctctgtattggtacctccagaaggctggacagcccccgcaactgctcatctacgaagtgtcaaatcgcttctccggggtgccggatcggttttccggctcgggatcgggcaccgacttcaccctgaaaatctccagggtcgaggccgaggacgtgggagcctactactgcatgcaaaacatccagttcccttccttcggcggcggcacaaagctggagattaagaccactaccccagcaccgaggccacccaccccggctcctaccatcgcctcccagcctctgtccctgcgtccggaggcatgtagacccgcagctggtggggccgtgcatacccggggtcttgacttcgcctgcgatatctacatttgggcccctctggctggtacttgcggggtcctgctgctttcactcgtgatcactctttactgtaagcgcggtcggaagaagctgctgtacatctttaagcaacccttcatgaggcctgtgcagactactcaagaggaggacggctgttcatgccggttcccagaggaggaggaaggcggctgcgaactgcgcgtgaaattcagccgcagcgcagatgctccagcctacaagcaggggcagaaccagctctacaacgaactcaatcttggtcggagagaggagtacgacgtgctggacaagcggagaggacgggacccagaaatgggcgggaagccgcgcagaaagaatccccaagagggcctgtacaacgagctccaaaaggataagatggcagaagcctatagcgagattggtatgaaaggggaacgcagaagaggcaaaggccacgacggactgtaccagggactcagcaccgccaccaaggacacctatgacgctcttcacatgcaggccctgccgcctcgg

SEQ ID NO: 991 - protein, 249 aa, Artificial Sequence
  Description of Artificial Sequence: Synthetic polypeptide
QVQLVQSGAEVRKTGASVKVSCKASGYIFDNFGINWVRQAPGQGLEWMGWINPKNNNTNYAQKFQGRVTITADESTNTAYMEVSSLRSEDTAVYYCARGPYYYQSYMDVWGQGTMVTVSSASGGGGSGGRASGGGGSDIVMTQTPLSLPVTPGEPASISCRSSQSLLHSNGYNYLNWYLQKPGQSPQLLIYLGSKRASGVPDRFSGSGSGTDFTLHITRVGAEDVGVYYCMQALQTPYTFGQGTKLEIK

SEQ ID NO: 992 - DNA, 747 bp, Artificial Sequence
  Description of Artificial Sequence: Synthetic polynucleotide
caagtccaactcgtccagtccggcgcagaagtcagaaaaaccggtgctagcgtgaaagtgtcctgcaaggcctccggctacattttcgataacttcggaatcaactgggtcagacaggccccgggccaggggctggaatggatgggatggatcaaccccaagaacaacaacaccaactacgcacagaagttccagggccgcgtgactatcaccgccgatgaatcgaccaataccgcctacatggaggtgtcctccctgcggtcggaggacactgccgtgtattactgcgcgaggggcccatactactaccaaagctacatggacgtctggggacagggaaccatggtgaccgtgtcatccgcctccggtggtggaggctccggggggcgggcttcaggaggcggaggaagcgatattgtgatgacccagactccgcttagcctgcccgtgactcctggagaaccggcctccatttcctgccggtcctcgcaatcactcctgcattccaacggttacaactacctgaattggtacctccagaagcctggccagtcgccccagttgctgatctatctgggctcgaagcgcgcctccggggtgcctgaccggtttagcggatctgggagcggcacggacttcactctccacatcacccgcgtgggagcggaggacgtgggagtgtactactgtatgcaggcgctgcagactccgtacacattcggacagggcaccaagctggagatcaag

SEQ ID NO: 993 - protein, 120 aa, Artificial Sequence
  Description of Artificial Sequence: Synthetic polypeptide
QVQLVQSGAEVRKTGASVKVSCKASGYIFDNFGINWVRQAPGQGLEWMGWINPKNNNTNYAQKFQGRVTITADESTNTAYMEVSSLRSEDTAVYYCARGPYYYQSYMDVWGQGTMVTVSS

SEQ ID NO: 994 - protein, 112 aa, Artificial Sequence
  Description of Artificial Sequence: Synthetic polypeptide
DIVMTQTPLSLPVTPGEPASISCRSSQSLLHSNGYNYLNWYLQKPGQSPQLLIYLGSKRASGVPDRFSGSGSGTDFTLHITRVGAEDVGVYYCMQALQTPYTFGQGTKLEIK

SEQ ID NO: 995 - protein, 493 aa, Artificial Sequence
  Description of Artificial Sequence: Synthetic polypeptide
MALPVTALLLPLALLLHAARPQVQLVQSGAEVRKTGASVKVSCKASGYIFDNFGINWVRQAPGQGLEWMGWINPKNNNTNYAQKFQGRVTITADESTNTAYMEVSSLRSEDTAVYYCARGPYYYQSYMDVWGQGTMVTVSSASGGGGSGGRASGGGGSDIVMTQTPLSLPVTPGEPASISCRSSQSLLHSNGYNYLNWYLQKPGQSPQLLIYLGSKRASGVPDRFSGSGSGTDFTLHITRVGAEDVGVYYCMQALQTPYTFGQGTKLEIKTTTPAPRPPTPAPTIASQPLSLRPEACRPAAGGAVHTRGLDFACDIYIWAPLAGTCGVLLLSLVITLYCKRGRKKLLYIFKQPFMRPVQTTQEEDGCSCRFPEEEEGGCELRVKFSRSADAPAYKQGQNQLYNELNLGRREEYDVLDKRRGRDPEMGGKPRRKNPQEGLYNELQKDKMAEAYSEIGMKGERRRGKGHDGLYQGLSTATKDTYDALHMQALPPR

SEQ ID NO: 996 - DNA, 1479 bp, Artificial Sequence
  Description of Artificial Sequence: Synthetic polynucleotide
atggccctccctgtcaccgccctgctgcttccgctggctcttctgctccacgccgctcggccccaagtccaactcgtccagtccggcgcagaagtcagaaaaaccggtgctagcgtgaaagtgtcctgcaaggcctccggctacattttcgataacttcggaatcaactgggtcagacaggccccgggccaggggctggaatggatgggatggatcaaccccaagaacaacaacaccaactacgcacagaagttccagggccgcgtgactatcaccgccgatgaatcgaccaataccgcctacatggaggtgtcctccctgcggtcggaggacactgccgtgtattactgcgcgaggggcccatactactaccaaagctacatggacgtctggggacagggaaccatggtgaccgtgtcatccgcctccggtggtggaggctccggggggcgggcttcaggaggcggaggaagcgatattgtgatgacccagactccgcttagcctgcccgtgactcctggagaaccggcctccatttcctgccggtcctcgcaatcactcctgcattccaacggttacaactacctgaattggtacctccagaagcctggccagtcgccccagttgctgatctatctgggctcgaagcgcgcctccggggtgcctgaccggtttagcggatctgggagcggcacggacttcactctccacatcacccgcgtgggagcggaggacgtgggagtgtactactgtatgcaggcgctgcagactccgtacacattcggacagggcaccaagctggagatcaagaccactaccccagcaccgaggccacccaccccggctcctaccatcgcctcccagcctctgtccctgcgtccggaggcatgtagacccgcagctggtggggccgtgcatacccggggtcttgacttcgcctgcgatatctacatttgggcccctctggctggtacttgcggggtcctgctgctttcactcgtgatcactctttactgtaagcgcggtcggaagaagctgctgtacatctttaagcaacccttcatgaggcctgtgcagactactcaagaggaggacggctgttcatgccggttcccagaggaggaggaaggcggctgcgaactgcgcgtgaaattcagccgcagcgcagatgctccagcctacaagcaggggcagaaccagctctacaacgaactcaatcttggtcggagagaggagtacgacgtgctggacaagcggagaggacgggacccagaaatgggcgggaagccgcgcagaaagaatccccaagagggcctgtacaacgagctccaaaaggataagatggcagaagcctatagcgagattggtatgaaaggggaacgcagaagaggcaaaggccacgacggactgtaccagggactcagcaccgccaccaaggacacctatgacgctcttcacatgcaggccctgccgcctcgg

SEQ ID NO: 997 - protein, 246 aa, Artificial Sequence
  Description of Artificial Sequence: Synthetic polypeptide
QVQLQESGGGLVQPGGSLRLSCAASGFTFSSDAMTWVRQAPGKGLEWVSVISGSGGTTYYADSVKGRFTISRDNSKNTLYLQMNSLRAEDTAVYYCAKLDSSGYYYARGPRYWGQGTLVTVSSASGGGGSGGRASGGGGSDIQLTQSPSSLSASVGDRVTITCRASQSISSYLNWYQQKPGKAPKLLIYGASTLASGVPARFSGSGSGTHFTLTINSLQSEDSATYYCQQSYKRASFGQGTKVEIK

SEQ ID NO: 998 - DNA, 738 bp, Artificial Sequence
  Description of Artificial Sequence: Synthetic polynucleotide
caagtgcaacttcaagaatcaggcggaggactcgtgcagcccggaggatcattgcggctctcgtgcgccgcctcgggcttcaccttctcgagcgacgccatgacctgggtccgccaggccccggggaaggggctggaatgggtgtctgtgatttccggctccgggggaactacgtactacgccgattccgtgaaaggtcgcttcactatctcccgggacaacagcaagaacaccctttatctgcaaatgaattccctccgcgccgaggacaccgccgtgtactactgcgccaagctggactcctcgggctactactatgcccggggtccgagatactggggacagggaaccctcgtgaccgtgtcctccgcgtccggcggaggagggtcgggagggcgggcctccggcggcggcggttcggacatccagctgacccagtccccatcctcactgagcgcaagcgtgggcgacagagtcaccattacatgcagggcgtcccagagcatcagctcctacctgaactggtaccaacagaagcctggaaaggctcctaagctgttgatctacggggcttcgaccctggcatccggggtgcccgcgaggtttagcggaagcggtagcggcactcacttcactctgaccattaacagcctccagtccgaggattcagccacttactactgtcagcagtcctacaagcgggccagcttcggacagggcactaaggtcgagatcaag

SEQ ID NO: 999 - protein, 123 aa, Artificial Sequence
  Description of Artificial Sequence: Synthetic polypeptide
QVQLQESGGGLVQPGGSLRLSCAASGFTFSSDAMTWVRQAPGKGLEWVSVISGSGGTTYYADSVKGRFTISRDNSKNTLYLQMNSLRAEDTAVYYCAKLDSSGYYYARGPRYWGQGTLVTVSS

SEQ ID NO: 1000 - protein, 106 aa, Artificial Sequence
  Description of Artificial Sequence: Synthetic polypeptide
DIQLTQSPSSLSASVGDRVTITCRASQSISSYLNWYQQKPGKAPKLLIYGASTLASGVPARFSGSGSGTHFTLTINSLQSEDSATYYCQQSYKRASFGQGTKVEIK

SEQ ID NO: 1001 - protein, 490 aa, Artificial Sequence
  Description of Artificial Sequence: Synthetic polypeptide
MALPVTALLLPLALLLHAARPQVQLQESGGGLVQPGGSLRLSCAASGFTFSSDAMTWVRQAPGKGLEWVSVISGSGGTTYYADSVKGRFTISRDNSKNTLYLQMNSLRAEDTAVYYCAKLDSSGYYYARGPRYWGQGTLVTVSSASGGGGSGGRASGGGGSDIQLTQSPSSLSASVGDRVTITCRASQSISSYLNWYQQKPGKAPKLLIYGASTLASGVPARFSGSGSGTHFTLTINSLQSEDSATYYCQQSYKRASFGQGTKVEIKTTTPAPRPPTPAPTIASQPLSLRPEACRPAAGGAVHTRGLDFACDIYIWAPLAGTCGVLLLSLVITLYCKRGRKKLLYIFKQPFMRPVQTTQEEDGCSCRFPEEEEGGCELRVKFSRSADAPAYKQGQNQLYNELNLGRREEYDVLDKRRGRDPEMGGKPRRKNPQEGLYNELQKDKMAEAYSEIGMKGERRRGKGHDGLYQGLSTATKDTYDALHMQALPPR

SEQ ID NO: 1002 - DNA, 1470 bp, Artificial Sequence
  Description of Artificial Sequence: Synthetic polynucleotide
atggccctccctgtcaccgccctgctgcttccgctggctcttctgctccacgccgctcggccccaagtgcaacttcaagaatcaggcggaggactcgtgcagcccggaggatcattgcggctctcgtgcgccgcctcgggcttcaccttctcgagcgacgccatgacctgggtccgccaggccccggggaaggggctggaatgggtgtctgtgatttccggctccgggggaactacgtactacgccgattccgtgaaaggtcgcttcactatctcccgggacaacagcaagaacaccctttatctgcaaatgaattccctccgcgccgaggacaccgccgtgtactactgcgccaagctggactcctcgggctactactatgcccggggtccgagatactggggacagggaaccctcgtgaccgtgtcctccgcgtccggcggaggagggtcgggagggcgggcctccggcggcggcggttcggacatccagctgacccagtccccatcctcactgagcgcaagcgtgggcgacagagtcaccattacatgcagggcgtcccagagcatcagctcctacctgaactggtaccaacagaagcctggaaaggctcctaagctgttgatctacggggcttcgaccctggcatccggggtgcccgcgaggtttagcggaagcggtagcggcactcacttcactctgaccattaacagcctccagtccgaggattcagccacttactactgtcagcagtcctacaagcgggccagcttcggacagggcactaaggtcgagatcaagaccactaccccagcaccgaggccacccaccccggctcctaccatcgcctcccagcctctgtccctgcgtccggaggcatgtagacccgcagctggtggggccgtgcatacccggggtcttgacttcgcctgcgatatctacatttgggcccctctggctggtacttgcggggtcctgctgctttcactcgtgatcactctttactgtaagcgcggtcggaagaagctgctgtacatctttaagcaacccttcatgaggcctgtgcagactactcaagaggaggacggctgttcatgccggttcccagaggaggaggaaggcggctgcgaactgcgcgtgaaattcagccgcagcgcagatgctccagcctacaagcaggggcagaaccagctctacaacgaactcaatcttggtcggagagaggagtacgacgtgctggacaagcggagaggacgggacccagaaatgggcgggaagccgcgcagaaagaatccccaagagggcctgtacaacgagctccaaaaggataagatggcagaagcctatagcgagattggtatgaaaggggaacgcagaagaggcaaaggccacgacggactgtaccagggactcagcaccgccaccaaggacacctatgacgctcttcacatgcaggccctgccgcctcgg

SEQ ID NO: 1003 - protein, 247 aa, Artificial Sequence
  Description of Artificial Sequence: Synthetic polypeptide
QVQLVQSGAEVKKPGASVKVSCKASGYTFSNYGITWVRQAPGQGLEWMGWISAYNGNTNYAQKFQGRVTMTRNTSISTAYMELSSLRSEDTAVYYCARGPYYYYMDVWGKGTMVTVSSASGGGGSGGRASGGGGSEIVMTQSPLSLPVTPGEPASISCRSSQSLLYSNGYNYVDWYLQKPGQSPQLLIYLGSNRASGVPDRFSGSGSGTDFKLQISRVEAEDVGIYYCMQGRQFPYSFGQGTKVEIK

SEQ ID NO: 1004 - DNA, 741 bp, Artificial Sequence
  Description of Artificial Sequence: Synthetic polynucleotide
caagtccaactggtccagagcggtgcagaagtgaagaagcccggagcgagcgtgaaagtgtcctgcaaggcttccgggtacaccttctccaactacggcatcacttgggtgcgccaggccccgggacagggcctggaatggatggggtggatttccgcgtacaacggcaatacgaactacgctcagaagttccagggtagagtgaccatgactaggaacacctccatttccaccgcctacatggaactgtcctccctgcggagcgaggacaccgccgtgtactattgcgcccggggaccatactactactacatggatgtctgggggaaggggactatggtcaccgtgtcatccgcctcgggaggcggcggatcaggaggacgcgcctctggtggtggaggatcggagatcgtgatgacccagagccctctctccttgcccgtgactcctggggagcccgcatccatttcatgccggagctcccagtcacttctctactccaacggctataactacgtggattggtacctccaaaagccgggccagagcccgcagctgctgatctacctgggctcgaacagggccagcggagtgcctgaccggttctccgggtcgggaagcgggaccgacttcaagctgcaaatctcgagagtggaggccgaggacgtgggaatctactactgtatgcagggccgccagtttccgtactcgttcggacagggcaccaaagtggaaatcaag

SEQ ID NO: 1005 - protein, 118 aa, Artificial Sequence
  Description of Artificial Sequence: Synthetic polypeptide
QVQLVQSGAEVKKPGASVKVSCKASGYTFSNYGITWVRQAPGQGLEWMGWISAYNGNTNYAQKFQGRVTMTRNTSISTAYMELSSLRSEDTAVYYCARGPYYYYMDVWGKGTMVTVSS

SEQ ID NO: 1006 - protein, 112 aa, Artificial Sequence
  Description of Artificial Sequence: Synthetic polypeptide
EIVMTQSPLSLPVTPGEPASISCRSSQSLLYSNGYNYVDWYLQKPGQSPQLLIYLGSNRASGVPDRFSGSGSGTDFKLQISRVEAEDVGIYYCMQGRQFPYSFGQGTKVEIK

SEQ ID NO: 1007 - protein, 491 aa, Artificial Sequence
  Description of Artificial Sequence: Synthetic polypeptide
MALPVTALLLPLALLLHAARPQVQLVQSGAEVKKPGASVKVSCKASGYTFSNYGITWVRQAPGQGLEWMGWISAYNGNTNYAQKFQGRVTMTRNTSISTAYMELSSLRSEDTAVYYCARGPYYYYMDVWGKGTMVTVSSASGGGGSGGRASGGGGSEIVMTQSPLSLPVTPGEPASISCRSSQSLLYSNGYNYVDWYLQKPGQSPQLLIYLGSNRASGVPDRFSGSGSGTDFKLQISRVEAEDVGIYYCMQGRQFPYSFGQGTKVEIKTTTPAPRPPTPAPTIASQPLSLRPEACRPAAGGAVHTRGLDFACDIYIWAPLAGTCGVLLLSLVITLYCKRGRKKLLYIFKQPFMRPVQTTQEEDGCSCRFPEEEEGGCELRVKFSRSADAPAYKQGQNQLYNELNLGRREEYDVLDKRRGRDPEMGGKPRRKNPQEGLYNELQKDKMAEAYSEIGMKGERRRGKGHDGLYQGLSTATKDTYDALHMQALPPR

SEQ ID NO: 1008 - DNA, 1473 bp, Artificial Sequence
  Description of Artificial Sequence: Synthetic polynucleotide
atggccctccctgtcaccgccctgctgcttccgctggctcttctgctccacgccgctcggccccaagtccaactggtccagagcggtgcagaagtgaagaagcccggagcgagcgtgaaagtgtcctgcaaggcttccgggtacaccttctccaactacggcatcacttgggtgcgccaggccccgggacagggcctggaatggatggggtggatttccgcgtacaacggcaatacgaactacgctcagaagttccagggtagagtgaccatgactaggaacacctccatttccaccgcctacatggaactgtcctccctgcggagcgaggacaccgccgtgtactattgcgcccggggaccatactactactacatggatgtctgggggaaggggactatggtcaccgtgtcatccgcctcgggaggcggcggatcaggaggacgcgcctctggtggtggaggatcggagatcgtgatgacccagagccctctctccttgcccgtgactcctggggagcccgcatccatttcatgccggagctcccagtcacttctctactccaacggctataactacgtggattggtacctccaaaagccgggccagagcccgcagctgctgatctacctgggctcgaacagggccagcggagtgcctgaccggttctccgggtcgggaagcgggaccgacttcaagctgcaaatctcgagagtggaggccgaggacgtgggaatctactactgtatgcagggccgccagtttccgtactcgttcggacagggcaccaaagtggaaatcaagaccactaccccagcaccgaggccacccaccccggctcctaccatcgcctcccagcctctgtccctgcgtccggaggcatgtagacccgcagctggtggggccgtgcatacccggggtcttgacttcgcctgcgatatctacatttgggcccctctggctggtacttgcggggtcctgctgctttcactcgtgatcactctttactgtaagcgcggtcggaagaagctgctgtacatctttaagcaacccttcatgaggcctgtgcagactactcaagaggaggacggctgttcatgccggttcccagaggaggaggaaggcggctgcgaactgcgcgtgaaattcagccgcagcgcagatgctccagcctacaagcaggggcagaaccagctctacaacgaactcaatcttggtcggagagaggagtacgacgtgctggacaagcggagaggacgggacccagaaatgggcgggaagccgcgcagaaagaatccccaagagggcctgtacaacgagctccaaaaggataagatggcagaagcctatagcgagattggtatgaaaggggaacgcagaagaggcaaaggccacgacggactgtaccagggactcagcaccgccaccaaggacacctatgacgctcttcacatgcaggccctgccgcctcgg

SEQ ID NO: 1009 - protein, 238 aa, Artificial Sequence
  Description of Artificial Sequence: Synthetic polypeptide
EVQLLETGGGLVQPGGSLRLSCAVSGFALSNHGMSWVRRAPGKGLEWVSGIVYSGSTYYAASVKGRFTISRDNSRNTLYLQMNSLRPEDTAIYYCSAHGGESDVWGQGTTVTVSSASGGGGSGGRASGGGGSEIVLTQSPATLSVSPGESATLSCRASQSVSSNLAWYQQKPGQAPRLLIYGASTRASGIPDRFSGSGSGTDFTLTISSLQAEDVAVYYCQQYGSSLTFGGGTKVEIK

SEQ ID NO: 1010 - DNA, 714 bp, Artificial Sequence
  Description of Artificial Sequence: Synthetic polynucleotide
gaagtgcaattgctcgaaactggaggaggtctggtgcaacctggaggatcacttcgcctgtcctgcgccgtgtcgggctttgccctgtccaaccatggaatgagctgggtccgccgcgcgccggggaagggcctcgaatgggtgtccggcatcgtctactccggctccacctactacgccgcgtccgtgaagggccggttcacgatttcacgggacaactcgcggaacaccctgtacctccaaatgaattcccttcggccggaggatactgccatctactactgctccgcccacggtggcgaatccgacgtctggggccagggaaccaccgtgaccgtgtccagcgcgtccgggggaggaggaagcgggggtagagcatcgggtggaggcggatcagagatcgtgctgacccagtcccccgccaccttgagcgtgtcaccaggagagtccgccaccctgtcatgccgcgccagccagtccgtgtcctccaacctggcttggtaccagcagaagccggggcaggcccctagactcctgatctatggggcgtcgacccgggcatctggaattcccgataggttcagcggatcgggctcgggcactgacttcactctgaccatctcctcgctgcaagccgaggacgtggctgtgtactactgtcagcagtacggaagctccctgactttcggtggcgggaccaaagtcgagattaag

SEQ ID NO: 1011 - protein, 115 aa, Artificial Sequence
  Description of Artificial Sequence: Synthetic polypeptide
EVQLLETGGGLVQPGGSLRLSCAVSGFALSNHGMSWVRRAPGKGLEWVSGIVYSGSTYYAASVKGRFTISRDNSRNTLYLQMNSLRPEDTAIYYCSAHGGESDVWGQGTTVTVSS

SEQ ID NO: 1012 - protein, 106 aa, Artificial Sequence
  Description of Artificial Sequence: Synthetic polypeptide
EIVLTQSPATLSVSPGESATLSCRASQSVSSNLAWYQQKPGQAPRLLIYGASTRASGIPDRFSGSGSGTDFTLTISSLQAEDVAVYYCQQYGSSLTFGGGTKVEIK

SEQ ID NO: 1013 - protein, 482 aa, Artificial Sequence
  Description of Artificial Sequence: Synthetic polypeptide
MALPVTALLLPLALLLHAARPEVQLLETGGGLVQPGGSLRLSCAVSGFALSNHGMSWVRRAPGKGLEWVSGIVYSGSTYYAASVKGRFTISRDNSRNTLYLQMNSLRPEDTAIYYCSAHGGESDVWGQGTTVTVSSASGGGGSGGRASGGGGSEIVLTQSPATLSVSPGESATLSCRASQSVSSNLAWYQQKPGQAPRLLIYGASTRASGIPDRFSGSGSGTDFTLTISSLQAEDVAVYYCQQYGSSLTFGGGTKVEIKTTTPAPRPPTPAPTIASQPLSLRPEACRPAAGGAVHTRGLDFACDIYIWAPLAGTCGVLLLSLVITLYCKRGRKKLLYIFKQPFMRPVQTTQEEDGCSCRFPEEEEGGCELRVKFSRSADAPAYKQGQNQLYNELNLGRREEYDVLDKRRGRDPEMGGKPRRKNPQEGLYNELQKDKMAEAYSEIGMKGERRRGKGHDGLYQGLSTATKDTYDALHMQALPPR

SEQ ID NO: 1014 - DNA, 1446 bp, Artificial Sequence
  Description of Artificial Sequence: Synthetic polynucleotide
atggccctccctgtcaccgccctgctgcttccgctggctcttctgctccacgccgctcggcccgaagtgcaattgctcgaaactggaggaggtctggtgcaacctggaggatcacttcgcctgtcctgcgccgtgtcgggctttgccctgtccaaccatggaatgagctgggtccgccgcgcgccggggaagggcctcgaatgggtgtccggcatcgtctactccggctccacctactacgccgcgtccgtgaagggccggttcacgatttcacgggacaactcgcggaacaccctgtacctccaaatgaattcccttcggccggaggatactgccatctactactgctccgcccacggtggcgaatccgacgtctggggccagggaaccaccgtgaccgtgtccagcgcgtccgggggaggaggaagcgggggtagagcatcgggtggaggcggatcagagatcgtgctgacccagtcccccgccaccttgagcgtgtcaccaggagagtccgccaccctgtcatgccgcgccagccagtccgtgtcctccaacctggcttggtaccagcagaagccggggcaggcccctagactcctgatctatggggcgtcgacccgggcatctggaattcccgataggttcagcggatcgggctcgggcactgacttcactctgaccatctcctcgctgcaagccgaggacgtggctgtgtactactgtcagcagtacggaagctccctgactttcggtggcgggaccaaagtcgagattaagaccactaccccagcaccgaggccacccaccccggctcctaccatcgcctcccagcctctgtccctgcgtccggaggcatgtagacccgcagctggtggggccgtgcatacccggggtcttgacttcgcctgcgatatctacatttgggcccctctggctggtacttgcggggtcctgctgctttcactcgtgatcactctttactgtaagcgcggtcggaagaagctgctgtacatctttaagcaacccttcatgaggcctgtgcagactactcaagaggaggacggctgttcatgccggttcccagaggaggaggaaggcggctgcgaactgcgcgtgaaattcagccgcagcgcagatgctccagcctacaagcaggggcagaaccagctctacaacgaactcaatcttggtcggagagaggagtacgacgtgctggacaagcggagaggacgggacccagaaatgggcgggaagccgcgcagaaagaatccccaagagggcctgtacaacgagctccaaaaggataagatggcagaagcctatagcgagattggtatgaaaggggaacgcagaagaggcaaaggccacgacggactgtaccagggactcagcaccgccaccaaggacacctatgacgctcttcacatgcaggccctgccgcctcgg

SEQ ID NO: 1015 - protein, 239 aa, Artificial Sequence
  Description of Artificial Sequence: Synthetic polypeptide
EVQLVETGGGLVQPGGSLRLSCAVSGFALSNHGMSWVRRAPGKGLEWVSGIVYSGSTYYAASVKGRFTISRDNSRNTLYLQMNSLRPEDTAIYYCSAHGGESDVWGQGTTVTVSSASGGGGSGGRASGGGGSEIVMTQSPATLSVSPGERATLSCRASQSVSSKLAWYQQKPGQAPRLLMYGASIRATGIPDRFSGSGSGTEFTLTISSLEPEDFAVYYCQQYGSSSWTFGQGTKVEIK

SEQ ID NO: 1016 - DNA, 717 bp, Artificial Sequence
  Description of Artificial Sequence: Synthetic polynucleotide
gaagtgcaattggtggaaactggaggaggacttgtgcaacctggaggatcattgagactgagctgcgcagtgtcgggattcgccctgagcaaccatggaatgtcctgggtcagaagggcccctggaaaaggcctcgaatgggtgtcagggatcgtgtactccggttccacttactacgccgcctccgtgaaggggcgcttcactatctcacgggataactcccgcaataccctgtacctccaaatgaacagcctgcggccggaggataccgccatctactactgttccgcccacggtggagagtctgacgtctggggccagggaactaccgtgaccgtgtcctccgcgtccggcggtggagggagcggcggccgcgccagcggcggcggaggctccgagatcgtgatgacccagagccccgctactctgtcggtgtcgcccggagaaagggcgaccctgtcctgccgggcgtcgcagtccgtgagcagcaagctggcttggtaccagcagaagccgggccaggcaccacgcctgcttatgtacggtgcctccattcgggccaccggaatcccggaccggttctcggggtcggggtccggtaccgagttcacactgaccatttcctcgctcgagcccgaggactttgccgtctattactgccagcagtacggctcctcctcatggacgttcggccaggggaccaaggtcgaaatcaag

SEQ ID NO: 1017 - protein, 115 aa, Artificial Sequence
  Description of Artificial Sequence: Synthetic polypeptide
EVQLVETGGGLVQPGGSLRLSCAVSGFALSNHGMSWVRRAPGKGLEWVSGIVYSGSTYYAASVKGRFTISRDNSRNTLYLQMNSLRPEDTAIYYCSAHGGESDVWGQGTTVTVSS

SEQ ID NO: 1018 - protein, 107 aa, Artificial Sequence
  Description of Artificial Sequence: Synthetic polypeptide
EIVMTQSPATLSVSPGERATLSCRASQSVSSKLAWYQQKPGQAPRLLMYGASIRATGIPDRFSGSGSGTEFTLTISSLEPEDFAVYYCQQYGSSSWTFGQGTKVEIK

SEQ ID NO: 1019 - protein, 483 aa, Artificial Sequence
  Description of Artificial Sequence: Synthetic polypeptide
MALPVTALLLPLALLLHAARPEVQLVETGGGLVQPGGSLRLSCAVSGFALSNHGMSWVRRAPGKGLEWVSGIVYSGSTYYAASVKGRFTISRDNSRNTLYLQMNSLRPEDTAIYYCSAHGGESDVWGQGTTVTVSSASGGGGSGGRASGGGGSEIVMTQSPATLSVSPGERATLSCRASQSVSSKLAWYQQKPGQAPRLLMYGASIRATGIPDRFSGSGSGTEFTLTISSLEPEDFAVYYCQQYGSSSWTFGQGTKVEIKTTTPAPRPPTPAPTIASQPLSLRPEACRPAAGGAVHTRGLDFACDIYIWAPLAGTCGVLLLSLVITLYCKRGRKKLLYIFKQPFMRPVQTTQEEDGCSCRFPEEEEGGCELRVKFSRSADAPAYKQGQNQLYNELNLGRREEYDVLDKRRGRDPEMGGKPRRKNPQEGLYNELQKDKMAEAYSEIGMKGERRRGKGHDGLYQGLSTATKDTYDALHMQALPPR

SEQ ID NO: 1020 - DNA, 1449 bp, Artificial Sequence
  Description of Artificial Sequence: Synthetic polynucleotide
atggccctccctgtcaccgccctgctgcttccgctggctcttctgctccacgccgctcggcccgaagtgcaattggtggaaactggaggaggacttgtgcaacctggaggatcattgagactgagctgcgcagtgtcgggattcgccctgagcaaccatggaatgtcctgggtcagaagggcccctggaaaaggcctcgaatgggtgtcagggatcgtgtactccggttccacttactacgccgcctccgtgaaggggcgcttcactatctcacgggataactcccgcaataccctgtacctccaaatgaacagcctgcggccggaggataccgccatctactactgttccgcccacggtggagagtctgacgtctggggccagggaactaccgtgaccgtgtcctccgcgtccggcggtggagggagcggcggccgcgccagcggcggcggaggctccgagatcgtgatgacccagagccccgctactctgtcggtgtcgcccggagaaagggcgaccctgtcctgccgggcgtcgcagtccgtgagcagcaagctggcttggtaccagcagaagccgggccaggcaccacgcctgcttatgtacggtgcctccattcgggccaccggaatcccggaccggttctcggggtcggggtccggtaccgagttcacactgaccatttcctcgctcgagcccgaggactttgccgtctattactgccagcagtacggctcctcctcatggacgttcggccaggggaccaaggtcgaaatcaagaccactaccccagcaccgaggccacccaccccggctcctaccatcgcctcccagcctctgtccctgcgtccggaggcatgtagacccgcagctggtggggccgtgcatacccggggtcttgacttcgcctgcgatatctacatttgggcccctctggctggtacttgcggggtcctgctgctttcactcgtgatcactctttactgtaagcgcggtcggaagaagctgctgtacatctttaagcaacccttcatgaggcctgtgcagactactcaagaggaggacggctgttcatgccggttcccagaggaggaggaaggcggctgcgaactgcgcgtgaaattcagccgcagcgcagatgctccagcctacaagcaggggcagaaccagctctacaacgaactcaatcttggtcggagagaggagtacgacgtgctggacaagcggagaggacgggacccagaaatgggcgggaagccgcgcagaaagaatccccaagagggcctgtacaacgagctccaaaaggataagatggcagaagcctatagcgagattggtatgaaaggggaacgcagaagaggcaaaggccacgacggactgtaccagggactcagcaccgccaccaaggacacctatgacgctcttcacatgcaggccctgccgcctcgg

SEQ ID NO: 1021 - protein, 241 aa, Artificial Sequence
  Description of Artificial Sequence: Synthetic polypeptide
EVQLVETGGGVVQPGGSLRLSCAVSGFALSNHGMSWVRRAPGKGLEWVSGIVYSGSTYYAASVKGRFTISRDNSRNTLYLQMNSLRPEDTAIYYCSAHGGESDVWGQGTTVTVSSASGGGGSGGRASGGGGSEIVLTQSPGTLSLSPGERATLSCRASQSVGSTNLAWYQQKPGQAPRLLIYDASNRATGIPDRFSGGGSGTDFTLTISRLEPEDFAVYYCQQYGSSPPWTFGQGTKVEIK

SEQ ID NO: 1022 - DNA, 723 bp, Artificial Sequence
  Description of Artificial Sequence: Synthetic polynucleotide
gaagtgcaattggtggagactggaggaggagtggtgcaacctggaggaagcctgagactgtcatgcgcggtgtcgggcttcgccctctccaaccacggaatgtcctgggtccgccgggcccctgggaaaggacttgaatgggtgtccggcatcgtgtactcgggttccacctactacgcggcctcagtgaagggccggtttactattagccgcgacaactccagaaacacactgtacctccaaatgaactcgctgcggccggaagataccgctatctactactgctccgcccatgggggagagtcggacgtctggggacagggcaccactgtcactgtgtccagcgcttccggcggtggtggaagcgggggacgggcctcaggaggcggtggcagcgagattgtgctgacccagtcccccgggaccctgagcctgtccccgggagaaagggccaccctctcctgtcgggcatcccagtccgtggggtctactaaccttgcatggtaccagcagaagcccggccaggcccctcgcctgctgatctacgacgcgtccaatagagccaccggcatcccggatcgcttcagcggaggcggatcgggcaccgacttcaccctcaccatttcaaggctggaaccggaggacttcgccgtgtactactgccagcagtatggttcgtccccaccctggacgttcggccaggggactaaggtcgagatcaag

SEQ ID NO: 1023 - protein, 115 aa, Artificial Sequence
  Description of Artificial Sequence: Synthetic polypeptide
EVQLVETGGGVVQPGGSLRLSCAVSGFALSNHGMSWVRRAPGKGLEWVSGIVYSGSTYYAASVKGRFTISRDNSRNTLYLQMNSLRPEDTAIYYCSAHGGESDVWGQGTTVTVSS

SEQ ID NO: 1024 - protein, 109 aa, Artificial Sequence
  Description of Artificial Sequence: Synthetic polypeptide
EIVLTQSPGTLSLSPGERATLSCRASQSVGSTNLAWYQQKPGQAPRLLIYDASNRATGIPDRFSGGGSGTDFTLTISRLEPEDFAVYYCQQYGSSPPWTFGQGTKVEIK

SEQ ID NO: 1025 - protein, 485 aa, Artificial Sequence
  Description of Artificial Sequence: Synthetic polypeptide
MALPVTALLLPLALLLHAARPEVQLVETGGGVVQPGGSLRLSCAVSGFALSNHGMSWVRRAPGKGLEWVSGIVYSGSTYYAASVKGRFTISRDNSRNTLYLQMNSLRPEDTAIYYCSAHGGESDVWGQGTTVTVSSASGGGGSGGRASGGGGSEIVLTQSPGTLSLSPGERATLSCRASQSVGSTNLAWYQQKPGQAPRLLIYDASNRATGIPDRFSGGGSGTDFTLTISRLEPEDFAVYYCQQYGSSPPWTFGQGTKVEIKTTTPAPRPPTPAPTIASQPLSLRPEACRPAAGGAVHTRGLDFACDIYIWAPLAGTCGVLLLSLVITLYCKRGRKKLLYIFKQPFMRPVQTTQEEDGCSCRFPEEEEGGCELRVKFSRSADAPAYKQGQNQLYNELNLGRREEYDVLDKRRGRDPEMGGKPRRKNPQEGLYNELQKDKMAEAYSEIGMKGERRRGKGHDGLYQGLSTATKDTYDALHMQALPPR

SEQ ID NO: 1026 - DNA, 1455 bp, Artificial Sequence
  Description of Artificial Sequence: Synthetic polynucleotide
atggccctccctgtcaccgccctgctgcttccgctggctcttctgctccacgccgctcggcccgaagtgcaattggtggagactggaggaggagtggtgcaacctggaggaagcctgagactgtcatgcgcggtgtcgggcttcgccctctccaaccacggaatgtcctgggtccgccgggcccctgggaaaggacttgaatgggtgtccggcatcgtgtactcgggttccacctactacgcggcctcagtgaagggccggtttactattagccgcgacaactccagaaacacactgtacctccaaatgaactcgctgcggccggaagataccgctatctactactgctccgcccatgggggagagtcggacgtctggggacagggcaccactgtcactgtgtccagcgcttccggcggtggtggaagcgggggacgggcctcaggaggcggtggcagcgagattgtgctgacccagtcccccgggaccctgagcctgtccccgggagaaagggccaccctctcctgtcgggcatcccagtccgtggggtctactaaccttgcatggtaccagcagaagcccggccaggcccctcgcctgctgatctacgacgcgtccaatagagccaccggcatcccggatcgcttcagcggaggcggatcgggcaccgacttcaccctcaccatttcaaggctggaaccggaggacttcgccgtgtactactgccagcagtatggttcgtccccaccctggacgttcggccaggggactaaggtcgagatcaagaccactaccccagcaccgaggccacccaccccggctcctaccatcgcctcccagcctctgtccctgcgtccggaggcatgtagacccgcagctggtggggccgtgcatacccggggtcttgacttcgcctgcgatatctacatttgggcccctctggctggtacttgcggggtcctgctgctttcactcgtgatcactctttactgtaagcgcggtcggaagaagctgctgtacatctttaagcaacccttcatgaggcctgtgcagactactcaagaggaggacggctgttcatgccggttcccagaggaggaggaaggcggctgcgaactgcgcgtgaaattcagccgcagcgcagatgctccagcctacaagcaggggcagaaccagctctacaacgaactcaatcttggtcggagagaggagtacgacgtgctggacaagcggagaggacgggacccagaaatgggcgggaagccgcgcagaaagaatccccaagagggcctgtacaacgagctccaaaaggataagatggcagaagcctatagcgagattggtatgaaaggggaacgcagaagaggcaaaggccacgacggactgtaccagggactcagcaccgccaccaaggacacctatgacgctcttcacatgcaggccctgccgcctcgg

SEQ ID NO: 1027 - protein, 239 aa, Artificial Sequence
  Description of Artificial Sequence: Synthetic polypeptide
QVQLVESGGGLVKPGGSLRLSCAASGFTFSDYYMSWIRQAPGKGLEWVSYISSSGSTIYYADSVKGRFTISRDNAKNSLYLQMNSLRAEDTAVYYCARESGDGMDVWGQGTTVTVSSASGGGGSGGRASGGGGSDIQMTQSPSSLSASVGDRVTITCRASQSISSYLNWYQQKPGKAPKLLIYAASSLQSGVPSRFSGSGSGTDFTLTISSLQPEDFATYYCQQSYTLAFGQGTKVDIK

SEQ ID NO: 1028 - DNA, 717 bp, Artificial Sequence
  Description of Artificial Sequence: Synthetic polynucleotide
caagtgcaactcgtggaatctggtggaggactcgtgaaacctggaggatcattgagactgtcatgcgcggcctcgggattcacgttctccgattactacatgagctggattcgccaggctccggggaagggactggaatgggtgtcctacatttcctcatccggctccaccatctactacgcggactccgtgaaggggagattcaccattagccgcgataacgccaagaacagcctgtaccttcagatgaactccctgcgggctgaagatactgccgtctactactgcgcaagggagagcggagatgggatggacgtctggggacagggtaccactgtgaccgtgtcgtcggcctccggcggagggggttcgggtggaagggccagcggcggcggaggcagcgacatccagatgacccagtccccctcatcgctgtccgcctccgtgggcgaccgcgtcaccatcacatgccgggcctcacagtcgatctcctcctacctcaattggtatcagcagaagcccggaaaggcccctaagcttctgatctacgcagcgtcctccctgcaatccggggtcccatctcggttctccggctcgggcagcggtaccgacttcactctgaccatctcgagcctgcagccggaggacttcgccacttactactgtcagcaaagctacaccctcgcgtttggccagggcaccaaagtggacatcaag

SEQ ID NO: 1029 - protein, 117 aa, Artificial Sequence
  Description of Artificial Sequence: Synthetic polypeptide
QVQLVESGGGLVKPGGSLRLSCAASGFTFSDYYMSWIRQAPGKGLEWVSYISSSGSTIYYADSVKGRFTISRDNAKNSLYLQMNSLRAEDTAVYYCARESGDGMDVWGQGTTVTVSS

SEQ ID NO: 1030 - protein, 105 aa, Artificial Sequence
  Description of Artificial Sequence: Synthetic polypeptide
DIQMTQSPSSLSASVGDRVTITCRASQSISSYLNWYQQKPGKAPKLLIYAASSLQSGVPSRFSGSGSGTDFTLTISSLQPEDFATYYCQQSYTLAFGQGTKVDIK

SEQ ID NO: 1031 - protein, 483 aa, Artificial Sequence
  Description of Artificial Sequence: Synthetic polypeptide
MALPVTALLLPLALLLHAARPQVQLVESGGGLVKPGGSLRLSCAASGFTFSDYYMSWIRQAPGKGLEWVSYISSSGSTIYYADSVKGRFTISRDNAKNSLYLQMNSLRAEDTAVYYCARESGDGMDVWGQGTTVTVSSASGGGGSGGRASGGGGSDIQMTQSPSSLSASVGDRVTITCRASQSISSYLNWYQQKPGKAPKLLIYAASSLQSGVPSRFSGSGSGTDFTLTISSLQPEDFATYYCQQSYTLAFGQGTKVDIKTTTPAPRPPTPAPTIASQPLSLRPEACRPAAGGAVHTRGLDFACDIYIWAPLAGTCGVLLLSLVITLYCKRGRKKLLYIFKQPFMRPVQTTQEEDGCSCRFPEEEEGGCELRVKFSRSADAPAYKQGQNQLYNELNLGRREEYDVLDKRRGRDPEMGGKPRRKNPQEGLYNELQKDKMAEAYSEIGMKGERRRGKGHDGLYQGLSTATKDTYDALHMQALPPR

SEQ ID NO: 1032 - DNA, 1449 bp, Artificial Sequence
  Description of Artificial Sequence: Synthetic polynucleotide
atggccctccctgtcaccgccctgctgcttccgctggctcttctgctccacgccgctcggccccaagtgcaactcgtggaatctggtggaggactcgtgaaacctggaggatcattgagactgtcatgcgcggcctcgggattcacgttctccgattactacatgagctggattcgccaggctccggggaagggactggaatgggtgtcctacatttcctcatccggctccaccatctactacgcggactccgtgaaggggagattcaccattagccgcgataacgccaagaacagcctgtaccttcagatgaactccctgcgggctgaagatactgccgtctactactgcgcaagggagagcggagatgggatggacgtctggggacagggtaccactgtgaccgtgtcgtcggcctccggcggagggggttcgggtggaagggccagcggcggcggaggcagcgacatccagatgacccagtccccctcatcgctgtccgcctccgtgggcgaccgcgtcaccatcacatgccgggcctcacagtcgatctcctcctacctcaattggtatcagcagaagcccggaaaggcccctaagcttctgatctacgcagcgtcctccctgcaatccggggtcccatctcggttctccggctcgggcagcggtaccgacttcactctgaccatctcgagcctgcagccggaggacttcgccacttactactgtcagcaaagctacaccctcgcgtttggccagggcaccaaagtggacatcaagaccactaccccagcaccgaggccacccaccccggctcctaccatcgcctcccagcctctgtccctgcgtccggaggcatgtagacccgcagctggtggggccgtgcatacccggggtcttgacttcgcctgcgatatctacatttgggcccctctggctggtacttgcggggtcctgctgctttcactcgtgatcactctttactgtaagcgcggtcggaagaagctgctgtacatctttaagcaacccttcatgaggcctgtgcagactactcaagaggaggacggctgttcatgccggttcccagaggaggaggaaggcggctgcgaactgcgcgtgaaattcagccgcagcgcagatgctccagcctacaagcaggggcagaaccagctctacaacgaactcaatcttggtcggagagaggagtacgacgtgctggacaagcggagaggacgggacccagaaatgggcgggaagccgcgcagaaagaatccccaagagggcctgtacaacgagctccaaaaggataagatggcagaagcctatagcgagattggtatgaaaggggaacgcagaagaggcaaaggccacgacggactgtaccagggactcagcaccgccaccaaggacacctatgacgctcttcacatgcaggccctgccgcctcgg

SEQ ID NO: 1033 - protein, 246 aa, Artificial Sequence
  Description of Artificial Sequence: Synthetic polypeptide
QVQLVQSGGGLVKPGGSLRLSCAASGFTFSDYYMSWIRQAPGKGLEWVSYISSSGNTIYYADSVKGRFTISRDNAKNSLYLQMNSLRAEDTAVYYCARSTMVREDYWGQGTLVTVSSASGGGGSGGRASGGGGSDIVLTQSPLSLPVTLGQPASISCKSSESLVHNSGKTYLNWFHQRPGQSPRRLIYEVSNRDSGVPDRFTGSGSGTDFTLKISRVEAEDVGVYYCMQGTHWPGTFGQGTKLEIK

SEQ ID NO: 1034 - DNA, 738 bp, Artificial Sequence
  Description of Artificial Sequence: Synthetic polynucleotide
caagtgcaactggtgcaaagcggaggaggattggtcaaacccggaggaagcctgagactgtcatgcgcggcctctggattcaccttctccgattactacatgtcatggatcagacaggccccggggaagggcctcgaatgggtgtcctacatctcgtcctccgggaacaccatctactacgccgacagcgtgaagggccgctttaccatttcccgcgacaacgcaaagaactcgctgtaccttcagatgaattccctgcgggctgaagataccgcggtgtactattgcgcccggtccactatggtccgggaggactactggggacagggcacactcgtgaccgtgtccagcgcgagcgggggtggaggcagcggtggacgcgcctccggcggcggcggttcagacatcgtgctgactcagtcgcccctgtcgctgccggtcaccctgggccaaccggcctcaattagctgcaagtcctcggagagcctggtgcacaactcaggaaagacttacctgaactggttccatcagcggcctggacagtccccacggaggctcatctatgaagtgtccaacagggattcgggggtgcccgaccgcttcactggctccgggtccggcaccgacttcaccttgaaaatctccagagtggaagccgaggacgtgggcgtgtactactgtatgcagggtacccactggcctggaacctttggacaaggaactaagctcgagattaag

SEQ ID NO: 1035 - protein, 117 aa, Artificial Sequence
  Description of Artificial Sequence: Synthetic polypeptide
QVQLVQSGGGLVKPGGSLRLSCAASGFTFSDYYMSWIRQAPGKGLEWVSYISSSGNTIYYADSVKGRFTISRDNAKNSLYLQMNSLRAEDTAVYYCARSTMVREDYWGQGTLVTVSS

SEQ ID NO: 1036 - protein, 112 aa, Artificial Sequence
  Description of Artificial Sequence: Synthetic polypeptide
DIVLTQSPLSLPVTLGQPASISCKSSESLVHNSGKTYLNWFHQRPGQSPRRLIYEVSNRDSGVPDRFTGSGSGTDFTLKISRVEAEDVGVYYCMQGTHWPGTFGQGTKLEIK

SEQ ID NO: 1037 - protein, 490 aa, Artificial Sequence
  Description of Artificial Sequence: Synthetic polypeptide
MALPVTALLLPLALLLHAARPQVQLVQSGGGLVKPGGSLRLSCAASGFTFSDYYMSWIRQAPGKGLEWVSYISSSGNTIYYADSVKGRFTISRDNAKNSLYLQMNSLRAEDTAVYYCARSTMVREDYWGQGTLVTVSSASGGGGSGGRASGGGGSDIVLTQSPLSLPVTLGQPASISCKSSESLVHNSGKTYLNWFHQRPGQSPRRLIYEVSNRDSGVPDRFTGSGSGTDFTLKISRVEAEDVGVYYCMQGTHWPGTFGQGTKLEIKTTTPAPRPPTPAPTIASQPLSLRPEACRPAAGGAVHTRGLDFACDIYIWAPLAGTCGVLLLSLVITLYCKRGRKKLLYIFKQPFMRPVQTTQEEDGCSCRFPEEEEGGCELRVKFSRSADAPAYKQGQNQLYNELNLGRREEYDVLDKRRGRDPEMGGKPRRKNPQEGLYNELQKDKMAEAYSEIGMKGERRRGKGHDGLYQGLSTATKDTYDALHMQALPPR

SEQ ID NO: 1038 - DNA, 1470 bp, Artificial Sequence
  Description of Artificial Sequence: Synthetic polynucleotide
atggccctccctgtcaccgccctgctgcttccgctggctcttctgctccacgccgctcggccccaagtgcaactggtgcaaagcggaggaggattggtcaaacccggaggaagcctgagactgtcatgcgcggcctctggattcaccttctccgattactacatgtcatggatcagacaggccccggggaagggcctcgaatgggtgtcctacatctcgtcctccgggaacaccatctactacgccgacagcgtgaagggccgctttaccatttcccgcgacaacgcaaagaactcgctgtaccttcagatgaattccctgcgggctgaagataccgcggtgtactattgcgcccggtccactatggtccgggaggactactggggacagggcacactcgtgaccgtgtccagcgcgagcgggggtggaggcagcggtggacgcgcctccggcggcggcggttcagacatcgtgctgactcagtcgcccctgtcgctgccggtcaccctgggccaaccggcctcaattagctgcaagtcctcggagagcctggtgcacaactcaggaaagacttacctgaactggttccatcagcggcctggacagtccccacggaggctcatctatgaagtgtccaacagggattcgggggtgcccgaccgcttcactggctccgggtccggcaccgacttcaccttgaaaatctccagagtggaagccgaggacgtgggcgtgtactactgtatgcagggtacccactggcctggaacctttggacaaggaactaagctcgagattaagaccactaccccagcaccgaggccacccaccccggctcctaccatcgcctcccagcctctgtccctgcgtccggaggcatgtagacccgcagctggtggggccgtgcatacccggggtcttgacttcgcctgcgatatctacatttgggcccctctggctggtacttgcggggtcctgctgctttcactcgtgatcactctttactgtaagcgcggtcggaagaagctgctgtacatctttaagcaacccttcatgaggcctgtgcagactactcaagaggaggacggctgttcatgccggttcccagaggaggaggaaggcggctgcgaactgcgcgtgaaattcagccgcagcgcagatgctccagcctacaagcaggggcagaaccagctctacaacgaactcaatcttggtcggagagaggagtacgacgtgctggacaagcggagaggacgggacccagaaatgggcgggaagccgcgcagaaagaatccccaagagggcctgtacaacgagctccaaaaggataagatggcagaagcctatagcgagattggtatgaaaggggaacgcagaagaggcaaaggccacgacggactgtaccagggactcagcaccgccaccaaggacacctatgacgctcttcacatgcaggccctgccgcctcgg

SEQ ID NO: 1039 - protein, 239 aa, Artificial Sequence
  Description of Artificial Sequence: Synthetic polypeptide
QVQLVESGGGLVQPGGSLRLSCAVSGFALSNHGMSWVRRAPGKGLEWVSGIVYSGSTYYAASVKGRFTISRDNSRNTLYLQMNSLRPEDTAIYYCSAHGGESDVWGQGTTVTVSSASGGGGSGGRASGGGGSDIRLTQSPSPLSASVGDRVTITCQASEDINKFLNWYHQTPGKAPKLLIYDASTLQTGVPSRFSGSGSGTDFTLTINSLQPEDIGTYYCQQYESLPLTFGGGTKVEIK

SEQ ID NO: 1040 - DNA, 717 bp, Artificial Sequence
  Description of Artificial Sequence: Synthetic polynucleotide
caagtgcaactcgtggaatctggtggaggactcgtgcaacccggtggaagccttaggctgtcgtgcgccgtcagcgggtttgctctgagcaaccatggaatgtcctgggtccgccgggcaccgggaaaagggctggaatgggtgtccggcatcgtgtacagcgggtcaacctattacgccgcgtccgtgaagggcagattcactatctcaagagacaacagccggaacaccctgtacttgcaaatgaattccctgcgccccgaggacaccgccatctactactgctccgcccacggaggagagtcggacgtgtggggccagggaacgactgtgactgtgtccagcgcatcaggagggggtggttcgggcggccgggcctcggggggaggaggttccgacattcggctgacccagtccccgtccccactgtcggcctccgtcggcgaccgcgtgaccatcacttgtcaggcgtccgaggacattaacaagttcctgaactggtaccaccagacccctggaaaggcccccaagctgctgatctacgatgcctcgacccttcaaactggagtgcctagccggttctccgggtccggctccggcactgatttcactctgaccatcaactcattgcagccggaagatatcgggacctactattgccagcagtacgaatccctcccgctcacattcggcgggggaaccaaggtcgagattaag

SEQ ID NO: 1041 - protein, 115 aa, Artificial Sequence
  Description of Artificial Sequence: Synthetic polypeptide
QVQLVESGGGLVQPGGSLRLSCAVSGFALSNHGMSWVRRAPGKGLEWVSGIVYSGSTYYAASVKGRFTISRDNSRNTLYLQMNSLRPEDTAIYYCSAHGGESDVWGQGTTVTVSS

SEQ ID NO: 1042 - protein, 107 aa, Artificial Sequence
  Description of Artificial Sequence: Synthetic polypeptide
DIRLTQSPSPLSASVGDRVTITCQASEDINKFLNWYHQTPGKAPKLLIYDASTLQTGVPSRFSGSGSGTDFTLTINSLQPEDIGTYYCQQYESLPLTFGGGTKVEIK

SEQ ID NO: 1043 - protein, 483 aa, Artificial Sequence
  Description of Artificial Sequence: Synthetic polypeptide
MALPVTALLLPLALLLHAARPQVQLVESGGGLVQPGGSLRLSCAVSGFALSNHGMSWVRRAPGKGLEWVSGIVYSGSTYYAASVKGRFTISRDNSRNTLYLQMNSLRPEDTAIYYCSAHGGESDVWGQGTTVTVSSASGGGGSGGRASGGGGSDIRLTQSPSPLSASVGDRVTITCQASEDINKFLNWYHQTPGKAPKLLIYDASTLQTGVPSRFSGSGSGTDFTLTINSLQPEDIGTYYCQQYESLPLTFGGGTKVEIKTTTPAPRPPTPAPTIASQPLSLRPEACRPAAGGAVHTRGLDFACDIYIWAPLAGTCGVLLLSLVITLYCKRGRKKLLYIFKQPFMRPVQTTQEEDGCSCRFPEEEEGGCELRVKFSRSADAPAYKQGQNQLYNELNLGRREEYDVLDKRRGRDPEMGGKPRRKNPQEGLYNELQKDKMAEAYSEIGMKGERRRGKGHDGLYQGLSTATKDTYDALHMQALPPR

SEQ ID NO: 1044 - DNA, 1449 bp, Artificial Sequence
  Description of Artificial Sequence: Synthetic polynucleotide
atggccctccctgtcaccgccctgctgcttccgctggctcttctgctccacgccgctcggccccaagtgcaactcgtggaatctggtggaggactcgtgcaacccggtggaagccttaggctgtcgtgcgccgtcagcgggtttgctctgagcaaccatggaatgtcctgggtccgccgggcaccgggaaaagggctggaatgggtgtccggcatcgtgtacagcgggtcaacctattacgccgcgtccgtgaagggcagattcactatctcaagagacaacagccggaacaccctgtacttgcaaatgaattccctgcgccccgaggacaccgccatctactactgctccgcccacggaggagagtcggacgtgtggggccagggaacgactgtgactgtgtccagcgcatcaggagggggtggttcgggcggccgggcctcggggggaggaggttccgacattcggctgacccagtccccgtccccactgtcggcctccgtcggcgaccgcgtgaccatcacttgtcaggcgtccgaggacattaacaagttcctgaactggtaccaccagacccctggaaaggcccccaagctgctgatctacgatgcctcgacccttcaaactggagtgcctagccggttctccgggtccggctccggcactgatttcactctgaccatcaactcattgcagccggaagatatcgggacctactattgccagcagtacgaatccctcccgctcacattcggcgggggaaccaaggtcgagattaagaccactaccccagcaccgaggccacccaccccggctcctaccatcgcctcccagcctctgtccctgcgtccggaggcatgtagacccgcagctggtggggccgtgcatacccggggtcttgacttcgcctgcgatatctacatttgggcccctctggctggtacttgcggggtcctgctgctttcactcgtgatcactctttactgtaagcgcggtcggaagaagctgctgtacatctttaagcaacccttcatgaggcctgtgcagactactcaagaggaggacggctgttcatgccggttcccagaggaggaggaaggcggctgcgaactgcgcgtgaaattcagccgcagcgcagatgctccagcctacaagcaggggcagaaccagctctacaacgaactcaatcttggtcggagagaggagtacgacgtgctggacaagcggagaggacgggacccagaaatgggcgggaagccgcgcagaaagaatccccaagagggcctgtacaacgagctccaaaaggataagatggcagaagcctatagcgagattggtatgaaaggggaacgcagaagaggcaaaggccacgacggactgtaccagggactcagcaccgccaccaaggacacctatgacgctcttcacatgcaggccctgccgcctcgg

SEQ ID NO: 1045 - protein, 240 aa, Artificial Sequence
  Description of Artificial Sequence: Synthetic polypeptide
EVQLVETGGGLVQPGGSLRLSCAVSGFALSNHGMSWVRRAPGKGLEWVSGIVYSGSTYYAASVKGRFTISRDNSRNTLYLQMNSLRPEDTAIYYCSAHGGESDVWGQGTTVTVSSASGGGGSGGRASGGGGSETTLTQSPATLSVSPGERATLSCRASQSVGSNLAWYQQKPGQGPRLLIYGASTRATGIPARFSGSGSGTEFTLTISSLQPEDFAVYYCQQYNDWLPVTFGQGTKVEIK

SEQ ID NO: 1046 - DNA, 720 bp, Artificial Sequence
  Description of Artificial Sequence: Synthetic polynucleotide
gaagtgcaattggtggaaactggaggaggacttgtgcaacctggaggatcattgcggctctcatgcgctgtctccggcttcgccctgtcaaatcacgggatgtcgtgggtcagacgggccccgggaaagggtctggaatgggtgtcggggattgtgtacagcggctccacctactacgccgcttcggtcaagggccgcttcactatttcacgggacaacagccgcaacaccctctatctgcaaatgaactctctccgcccggaggataccgccatctactactgctccgcacacggcggcgaatccgacgtgtggggacagggaaccactgtcaccgtgtcgtccgcatccggtggcggaggatcgggtggccgggcctccgggggcggcggcagcgagactaccctgacccagtcccctgccactctgtccgtgagcccgggagagagagccacccttagctgccgggccagccagagcgtgggctccaacctggcctggtaccagcagaagccaggacagggtcccaggctgctgatctacggagcctccactcgcgcgaccggcatccccgcgaggttctccgggtcgggttccgggaccgagttcaccctgaccatctcctccctccaaccggaggacttcgcggtgtactactgtcagcagtacaacgattggctgcccgtgacatttggacaggggacgaaggtggaaatcaaa

SEQ ID NO: 1047 - protein, 115 aa, Artificial Sequence; identical to SEQ ID NO: 1017
  Description of Artificial Sequence: Synthetic polypeptide

SEQ ID NO: 1048 - protein, 108 aa, Artificial Sequence
  Description of Artificial Sequence: Synthetic polypeptide
ETTLTQSPATLSVSPGERATLSCRASQSVGSNLAWYQQKPGQGPRLLIYGASTRATGIPARFSGSGSGTEFTLTISSLQPEDFAVYYCQQYNDWLPVTFGQGTKVEIK

SEQ ID NO: 1049 - protein, 484 aa, Artificial Sequence
  Description of Artificial Sequence: Synthetic polypeptide
MALPVTALLLPLALLLHAARPEVQLVETGGGLVQPGGSLRLSCAVSGFALSNHGMSWVRRAPGKGLEWVSGIVYSGSTYYAASVKGRFTISRDNSRNTLYLQMNSLRPEDTAIYYCSAHGGESDVWGQGTTVTVSSASGGGGSGGRASGGGGSETTLTQSPATLSVSPGERATLSCRASQSVGSNLAWYQQKPGQGPRLLIYGASTRATGIPARFSGSGSGTEFTLTISSLQPEDFAVYYCQQYNDWLPVTFGQGTKVEIKTTTPAPRPPTPAPTIASQPLSLRPEACRPAAGGAVHTRGLDFACDIYIWAPLAGTCGVLLLSLVITLYCKRGRKKLLYIFKQPFMRPVQTTQEEDGCSCRFPEEEEGGCELRVKFSRSADAPAYKQGQNQLYNELNLGRREEYDVLDKRRGRDPEMGGKPRRKNPQEGLYNELQKDKMAEAYSEIGMKGERRRGKGHDGLYQGLSTATKDTYDALHMQALPPR

SEQ ID NO: 1050 - DNA, 1452 bp, Artificial Sequence
  Description of Artificial Sequence: Synthetic polynucleotide
atggccctccctgtcaccgccctgctgcttccgctggctcttctgctccacgccgctcggcccgaagtgcaattggtggaaactggaggaggacttgtgcaacctggaggatcattgcggctctcatgcgctgtctccggcttcgccctgtcaaatcacgggatgtcgtgggtcagacgggccccgggaaagggtctggaatgggtgtcggggattgtgtacagcggctccacctactacgccgcttcggtcaagggccgcttcactatttcacgggacaacagccgcaacaccctctatctgcaaatgaactctctccgcccggaggataccgccatctactactgctccgcacacggcggcgaatccgacgtgtggggacagggaaccactgtcaccgtgtcgtccgcatccggtggcggaggatcgggtggccgggcctccgggggcggcggcagcgagactaccctgacccagtcccctgccactctgtccgtgagcccgggagagagagccacccttagctgccgggccagccagagcgtgggctccaacctggcctggtaccagcagaagccaggacagggtcccaggctgctgatctacggagcctccactcgcgcgaccggcatccccgcgaggttctccgggtcgggttccgggaccgagttcaccctgaccatctcctccctccaaccggaggacttcgcggtgtactactgtcagcagtacaacgattggctgcccgtgacatttggacaggggacgaaggtggaaatcaaaaccactaccccagcaccgaggccacccaccccggctcctaccatcgcctcccagcctctgtccctgcgtccggaggcatgtagacccgcagctggtggggccgtgcatacccggggtcttgacttcgcctgcgatatctacatttgggcccctctggctggtacttgcggggtcctgctgctttcactcgtgatcactctttactgtaagcgcggtcggaagaagctgctgtacatctttaagcaacccttcatgaggcctgtgcagactactcaagaggaggacggctgttcatgccggttcccagaggaggaggaaggcggctgcgaactgcgcgtgaaattcagccgcagcgcagatgctccagcctacaagcaggggcagaaccagctctacaacgaactcaatcttggtcggagagaggagtacgacgtgctggacaagcggagaggacgggacccagaaatgggcgggaagccgcgcagaaagaatccccaagagggcctgtacaacgagctccaaaaggataagatggcagaagcctatagcgagattggtatgaaaggggaacgcagaagaggcaaaggccacgacggactgtaccagggactcagcaccgccaccaaggacacctatgacgctcttcacatgcaggccctgccgcctcgg

SEQ ID NO: 1051 - protein, 241 aa, Artificial Sequence
  Description of Artificial Sequence: Synthetic polypeptide
EVQLVESGGGLVQPGGSLRLSCAVSGFALSNHGMSWVRRAPGKGLEWVSGIVYSGSTYYAASVKGRFTISRDNSRNTLYLQMNSLRPEDTAIYYCSAHGGESDVWGQGTTVTVSSASGGGGSGGRASGGGGSEIVLTQSPGTLSLSPGERATLSCRASQSIGSSSLAWYQQKPGQAPRLLMYGASSRASGIPDRFSGSGSGTDFTLTISRLEPEDFAVYYCQQYAGSPPFTFGQGTKVEIK

SEQ ID NO: 1052 - DNA, 723 bp, Artificial Sequence
  Description of Artificial Sequence: Synthetic polynucleotide
gaagtgcaattggtggaatctggtggaggacttgtgcaacctggaggatcactgagactgtcatgcgcggtgtccggttttgccctgagcaatcatgggatgtcgtgggtccggcgcgcccccggaaagggtctggaatgggtgtcgggtatcgtctactccgggagcacttactacgccgcgagcgtgaagggccgcttcaccatttcccgcgataactcccgcaacaccctgtacttgcaaatgaactcgctccggcctgaggacactgccatctactactgctccgcacacggaggagaatccgacgtgtggggccagggaactaccgtgaccgtcagcagcgcctccggcggcgggggctcaggcggacgggctagcggcggcggtggctccgagatcgtgctgacccagtcgcctggcactctctcgctgagccccggggaaagggcaaccctgtcctgtcgggccagccagtccattggatcatcctccctcgcctggtatcagcagaaaccgggacaggctccgcggctgcttatgtatggggccagctcaagagcctccggcattcccgaccggttctccgggtccggttccggcaccgatttcaccctgactatctcgaggctggagccagaggacttcgccgtgtactactgccagcagtacgcggggtccccgccgttcacgttcggacagggaaccaaggtcgagatcaag

SEQ ID NO: 1053 - protein, 115 aa, Artificial Sequence; identical to SEQ ID NO: 969
  Description of Artificial Sequence: Synthetic polypeptide

SEQ ID NO: 1054 - protein, 109 aa, Artificial Sequence
  Description of Artificial Sequence: Synthetic polypeptide
EIVLTQSPGTLSLSPGERATLSCRASQSIGSSSLAWYQQKPGQAPRLLMYGASSRASGIPDRFSGSGSGTDFTLTISRLEPEDFAVYYCQQYAGSPPFTFGQGTKVEIK

SEQ ID NO: 1055 - protein, 485 aa, Artificial Sequence
  Description of Artificial Sequence: Synthetic polypeptide
MALPVTALLLPLALLLHAARPEVQLVESGGGLVQPGGSLRLSCAVSGFALSNHGMSWVRRAPGKGLEWVSGIVYSGSTYYAASVKGRFTISRDNSRNTLYLQMNSLRPEDTAIYYCSAHGGESDVWGQGTTVTVSSASGGGGSGGRASGGGGSEIVLTQSPGTLSLSPGERATLSCRASQSIGSSSLAWYQQKPGQAPRLLMYGASSRASGIPDRFSGSGSGTDFTLTISRLEPEDFAVYYCQQYAGSPPFTFGQGTKVEIKTTTPAPRPPTPAPTIASQPLSLRPEACRPAAGGAVHTRGLDFACDIYIWAPLAGTCGVLLLSLVITLYCKRGRKKLLYIFKQPFMRPVQTTQEEDGCSCRFPEEEEGGCELRVKFSRSADAPAYKQGQNQLYNELNLGRREEYDVLDKRRGRDPEMGGKPRRKNPQEGLYNELQKDKMAEAYSEIGMKGERRRGKGHDGLYQGLSTATKDTYDALHMQALPPR

SEQ ID NO: 1056 - DNA, 1455 bp, Artificial Sequence
  Description of Artificial Sequence: Synthetic polynucleotide
atggccctccctgtcaccgccctgctgcttccgctggctcttctgctccacgccgctcggcccgaagtgcaattggtggaatctggtggaggacttgtgcaacctggaggatcactgagactgtcatgcgcggtgtccggttttgccctgagcaatcatgggatgtcgtgggtccggcgcgcccccggaaagggtctggaatgggtgtcgggtatcgtctactccgggagcacttactacgccgcgagcgtgaagggccgcttcaccatttcccgcgataactcccgcaacaccctgtacttgcaaatgaactcgctccggcctgaggacactgccatctactactgctccgcacacggaggagaatccgacgtgtggggccagggaactaccgtgaccgtcagcagcgcctccggcggcgggggctcaggcggacgggctagcggcggcggtggctccgagatcgtgctgacccagtcgcctggcactctctcgctgagccccggggaaagggcaaccctgtcctgtcgggccagccagtccattggatcatcctccctcgcctggtatcagcagaaaccgggacaggctccgcggctgcttatgtatggggccagctcaagagcctccggcattcccgaccggttctccgggtccggttccggcaccgatttcaccctgactatctcgaggctggagccagaggacttcgccgtgtactactgccagcagtacgcggggtccccgccgttcacgttcggacagggaaccaaggtcgagatcaagaccactaccccagcaccgaggccacccaccccggctcctaccatcgcctcccagcctctgtccctgcgtccggaggcatgtagacccgcagctggtggggccgtgcatacccggggtcttgacttcgcctgcgatatctacatttgggcccctctggctggtacttgcggggtcctgctgctttcactcgtgatcactctttactgtaagcgcggtcggaagaagctgctgtacatctttaagcaacccttcatgaggcctgtgcagactactcaagaggaggacggctgttcatgccggttcccagaggaggaggaaggcggctgcgaactgcgcgtgaaattcagccgcagcgcagatgctccagcctacaagcaggggcagaaccagctctacaacgaactcaatcttggtcggagagaggagtacgacgtgctggacaagcggagaggacgggacccagaaatgggcgggaagccgcgcagaaagaatccccaagagggcctgtacaacgagctccaaaaggataagatggcagaagcctatagcgagattggtatgaaaggggaacgcagaagaggcaaaggccacgacggactgtaccagggactcagcaccgccaccaaggacacctatgacgctcttcacatgcaggccctgccgcctcgg

SEQ ID NO: 1057 - protein, 243 aa, Artificial Sequence
  Description of Artificial Sequence: Synthetic polypeptide
QVQLQESGPGLVKPSETLSLTCTVSGGSISSSYYYWGWIRQPPGKGLEWIGSIYYSGSAYYNPSLKSRVTISVDTSKNQFSLRLSSVTAADTAVYYCARHWQEWPDAFDIWGQGTMVTVSSGGGGSGGGGSGGGGSETTLTQSPAFMSATPGDKVIISCKASQDIDDAMNWYQQKPGEAPLFIIQSATSPVPGIPPRFSGSGFGTDFSLTINNIESEDAAYYFCLQHDNFPLTFGQGTKLEIK

SEQ ID NO: 1058 - DNA, 729 bp, Artificial Sequence
  Description of Artificial Sequence: Synthetic polynucleotide
caagtgcagcttcaggaaagcggaccgggcctggtcaagccatccgaaactctctccctgacttgcactgtgtctggcggttccatctcatcgtcgtactactactggggctggattaggcagccgcccggaaagggactggagtggatcggaagcatctactattccggctcggcgtactacaaccctagcctcaagtcgagagtgaccatctccgtggatacctccaagaaccagttttccctgcgcctgagctccgtgaccgccgctgacaccgccgtgtactactgtgctcggcattggcaggaatggcccgatgccttcgacatttggggccagggcactatggtcactgtgtcatccgggggtggaggcagcgggggaggagggtccggggggggaggttcagagacaaccttgacccagtcacccgcattcatgtccgccactccgggagacaaggtcatcatctcgtgcaaagcgtcccaggatatcgacgatgccatgaattggtaccagcagaagcctggcgaagcgccgctgttcattatccaatccgcaacctcgcccgtgcctggaatcccaccgcggttcagcggcagcggtttcggaaccgacttttccctgaccattaacaacattgagtccgaggacgccgcctactacttctgcctgcaacacgacaacttccctctcacgttcggccagggaaccaagctggaaatcaag

SEQ ID NO: 1059 - protein, 121 aa, Artificial Sequence
  Description of Artificial Sequence: Synthetic polypeptide
QVQLQESGPGLVKPSETLSLTCTVSGGSISSSYYYWGWIRQPPGKGLEWIGSIYYSGSAYYNPSLKSRVTISVDTSKNQFSLRLSSVTAADTAVYYCARHWQEWPDAFDIWGQGTMVTVSS

SEQ ID NO: 1060 - protein, 107 aa, Artificial Sequence
  Description of Artificial Sequence: Synthetic polypeptide
ETTLTQSPAFMSATPGDKVIISCKASQDIDDAMNWYQQKPGEAPLFIIQSATSPVPGIPPRFSGSGFGTDFSLTINNIESEDAAYYFCLQHDNFPLTFGQGTKLEIK

SEQ ID NO: 1061 - protein, 487 aa, Artificial Sequence
  Description of Artificial Sequence: Synthetic polypeptide
MALPVTALLLPLALLLHAARPQVQLQESGPGLVKPSETLSLTCTVSGGSISSSYYYWGWIRQPPGKGLEWIGSIYYSGSAYYNPSLKSRVTISVDTSKNQFSLRLSSVTAADTAVYYCARHWQEWPDAFDIWGQGTMVTVSSGGGGSGGGGSGGGGSETTLTQSPAFMSATPGDKVIISCKASQDIDDAMNWYQQKPGEAPLFIIQSATSPVPGIPPRFSGSGFGTDFSLTINNIESEDAAYYFCLQHDNFPLTFGQGTKLEIKTTTPAPRPPTPAPTIASQPLSLRPEACRPAAGGAVHTRGLDFACDIYIWAPLAGTCGVLLLSLVITLYCKRGRKKLLYIFKQPFMRPVQTTQEEDGCSCRFPEEEEGGCELRVKFSRSADAPAYKQGQNQLYNELNLGRREEYDVLDKRRGRDPEMGGKPRRKNPQEGLYNELQKDKMAEAYSEIGMKGERRRGKGHDGLYQGLSTATKDTYDALHMQALPPR

SEQ ID NO: 1062 - DNA, 1461 bp, Artificial Sequence
  Description of Artificial Sequence: Synthetic polynucleotide
atggccctccctgtcaccgccctgctgcttccgctggctcttctgctccacgccgctcggccccaagtgcagcttcaggaaagcggaccgggcctggtcaagccatccgaaactctctccctgacttgcactgtgtctggcggttccatctcatcgtcgtactactactggggctggattaggcagccgcccggaaagggactggagtggatcggaagcatctactattccggctcggcgtactacaaccctagcctcaagtcgagagtgaccatctccgtggatacctccaagaaccagttttccctgcgcctgagctccgtgaccgccgctgacaccgccgtgtactactgtgctcggcattggcaggaatggcccgatgccttcgacatttggggccagggcactatggtcactgtgtcatccgggggtggaggcagcgggggaggagggtccggggggggaggttcagagacaaccttgacccagtcacccgcattcatgtccgccactccgggagacaaggtcatcatctcgtgcaaagcgtcccaggatatcgacgatgccatgaattggtaccagcagaagcctggcgaagcgccgctgttcattatccaatccgcaacctcgcccgtgcctggaatcccaccgcggttcagcggcagcggtttcggaaccgacttttccctgaccattaacaacattgagtccgaggacgccgcctactacttctgcctgcaacacgacaacttccctctcacgttcggccagggaaccaagctggaaatcaagaccactaccccagcaccgaggccacccaccccggctcctaccatcgcctcccagcctctgtccctgcgtccggaggcatgtagacccgcagctggtggggccgtgcatacccggggtcttgacttcgcctgcgatatctacatttgggcccctctggctggtacttgcggggtcctgctgctttcactcgtgatcactctttactgtaagcgcggtcggaagaagctgctgtacatctttaagcaacccttcatgaggcctgtgcagactactcaagaggaggacggctgttcatgccggttcccagaggaggaggaaggcggctgcgaactgcgcgtgaaattcagccgcagcgcagatgctccagcctacaagcaggggcagaaccagctctacaacgaactcaatcttggtcggagagaggagtacgacgtgctggacaagcggagaggacgggacccagaaatgggcgggaagccgcgcagaaagaatccccaagagggcctgtacaacgagctccaaaaggataagatggcagaagcctatagcgagattggtatgaaaggggaacgcagaagaggcaaaggccacgacggactgtaccagggactcagcaccgccaccaaggacacctatgacgctcttcacatgcaggccctgccgcctcgg

SEQ ID NO: 1063 - protein, 244 aa, Artificial Sequence
  Description of Artificial Sequence: Synthetic polypeptide
VNLRESGPALVKPTQTLTLTCTFSGFSLRTSGMCVSWIRQPPGKALEWLARIDWDEDKFYSTSLKTRLTISKDTSDNQVVLRMTNMDPADTATYYCARSGAGGTSATAFDIWGPGTMVTVSSGGGGSGGGGSGGGGSDIQMTQSPSSLSASVGDRVTITCRASQDIYNNLAWFQLKPGSAPRSLMYAANKSQSGVPSRFSGSASGTDFTLTISSLQPEDFATYYCQHYYRFPYSFGQGTKLEIK

SEQ ID NO: 1064 - DNA, 735 bp, Artificial Sequence
  Description of Artificial Sequence: Synthetic polynucleotide
caagtcaatctgcgcgaatccggccccgccttggtcaagcctacccagaccctcactctgacctgtactttctccggcttctccctgcggacttccgggatgtgcgtgtcctggatcagacagcctccgggaaaggccctggagtggctcgctcgcattgactgggatgaggacaagttctactccacctcactcaagaccaggctgaccatcagcaaagatacctctgacaaccaagtggtgctccgcatgaccaacatggacccagccgacactgccacttactactgcgcgaggagcggagcgggcggaacctccgccaccgccttcgatatttggggcccgggtaccatggtcaccgtgtcaagcggaggaggggggtccgggggcggcggttccgggggaggcggatcggacattcagatgactcagtcaccatcgtccctgagcgctagcgtgggcgacagagtgacaatcacttgccgggcatcccaggacatctataacaaccttgcgtggttccagctgaagcctggttccgcaccgcggtcacttatgtacgccgccaacaagagccagtcgggagtgccgtcccggttttccggttcggcctcgggaactgacttcaccctgacgatctccagcctgcaacccgaggatttcgccacctactactgccagcactactaccgctttccctactcgttcggacagggaaccaagctggaaatcaag

SEQ ID NO: 1065 - protein, 123 aa, Artificial Sequence
  Description of Artificial Sequence: Synthetic polypeptide
QVNLRESGPALVKPTQTLTLTCTFSGFSLRTSGMCVSWIRQPPGKALEWLARIDWDEDKFYSTSLKTRLTISKDTSDNQVVLRMTNMDPADTATYYCARSGAGGTSATAFDIWGPGTMVTVSS

SEQ ID NO: 1066 - protein, 107 aa, Artificial Sequence
  Description of Artificial Sequence: Synthetic polypeptide
DIQMTQSPSSLSASVGDRVTITCRASQDIYNNLAWFQLKPGSAPRSLMYAANKSQSGVPSRFSGSASGTDFTLTISSLQPEDFATYYCQHYYRFPYSFGQGTKLEIK

SEQ ID NO: 1067 - protein, 489 aa, Artificial Sequence
  Description of Artificial Sequence: Synthetic polypeptide
MALPVTALLLPLALLLHAARPQVNLRESGPALVKPTQTLTLTCTFSGFSLRTSGMCVSWIRQPPGKALEWLARIDWDEDKFYSTSLKTRLTISKDTSDNQVVLRMTNMDPADTATYYCARSGAGGTSATAFDIWGPGTMVTVSSGGGGSGGGGSGGGGSDIQMTQSPSSLSASVGDRVTITCRASQDIYNNLAWFQLKPGSAPRSLMYAANKSQSGVPSRFSGSASGTDFTLTISSLQPEDFATYYCQHYYRFPYSFGQGTKLEIKTTTPAPRPPTPAPTIASQPLSLRPEACRPAAGGAVHTRGLDFACDIYIWAPLAGTCGVLLLSLVITLYCKRGRKKLLYIFKQPFMRPVQTTQEEDGCSCRFPEEEEGGCELRVKFSRSADAPAYKQGQNQLYNELNLGRREEYDVLDKRRGRDPEMGGKPRRKNPQEGLYNELQKDKMAEAYSEIGMKGERRRGKGHDGLYQGLSTATKDTYDALHMQALPPR

SEQ ID NO: 1068 - DNA, 1467 bp, Artificial Sequence
  Description of Artificial Sequence: Synthetic polynucleotide
atggccctccctgtcaccgccctgctgcttccgctggctcttctgctccacgccgctcggccccaagtcaatctgcgcgaatccggccccgccttggtcaagcctacccagaccctcactctgacctgtactttctccggcttctccctgcggacttccgggatgtgcgtgtcctggatcagacagcctccgggaaaggccctggagtggctcgctcgcattgactgggatgaggacaagttctactccacctcactcaagaccaggctgaccatcagcaaagatacctctgacaaccaagtggtgctccgcatgaccaacatggacccagccgacactgccacttactactgcgcgaggagcggagcgggcggaacctccgccaccgccttcgatatttggggcccgggtaccatggtcaccgtgtcaagcggaggaggggggtccgggggcggcggttccgggggaggcggatcggacattcagatgactcagtcaccatcgtccctgagcgctagcgtgggcgacagagtgacaatcacttgccgggcatcccaggacatctataacaaccttgcgtggttccagctgaagcctggttccgcaccgcggtcacttatgtacgccgccaacaagagccagtcgggagtgccgtcccggttttccggttcggcctcgggaactgacttcaccctgacgatctccagcctgcaacccgaggatttcgccacctactactgccagcactactaccgctttccctactcgttcggacagggaaccaagctggaaatcaagaccactaccccagcaccgaggccacccaccccggctcctaccatcgcctcccagcctctgtccctgcgtccggaggcatgtagacccgcagctggtggggccgtgcatacccggggtcttgacttcgcctgcgatatctacatttgggcccctctggctggtacttgcggggtcctgctgctttcactcgtgatcactctttactgtaagcgcggtcggaagaagctgctgtacatctttaagcaacccttcatgaggcctgtgcagactactcaagaggaggacggctgttcatgccggttcccagaggaggaggaaggcggctgcgaactgcgcgtgaaattcagccgcagcgcagatgctccagcctacaagcaggggcagaaccagctctacaacgaactcaatcttggtcggagagaggagtacgacgtgctggacaagcggagaggacgggacccagaaatgggcgggaagccgcgcagaaagaatccccaagagggcctgtacaacgagctccaaaaggataagatggcagaagcctatagcgagattggtatgaaaggggaacgcagaagaggcaaaggccacgacggactgtaccagggactcagcaccgccaccaaggacacctatgacgctcttcacatgcaggccctgccgcctcgg

SEQ ID NO: 1069 - protein, 246 aa, Artificial Sequence
  Description of Artificial Sequence: Synthetic polypeptide
EVQLVESGGGLVKPGGSLRLSCAASGFTFSSYSMNWVRQAPGKGLEWVSSISSSSSYIYYADSVKGRFTISRDNAKNSLYLQMNSLRAEDTAVYYCAKTIAAVYAFDIWGQGTTVTVSSGGGGSGGGGSGGGGSEIVLTQSPLSLPVTPEEPASISCRSSQSLLHSNGYNYLDWYLQKPGQSPQLLIYLGSNRASGVPDRFSGSGSGTDFTLKISRVEAEDVGVYYCMQALQTPYTFGQGTKLEIK

SEQ ID NO: 1070 - DNA, 738 bp, Artificial Sequence
  Description of Artificial Sequence: Synthetic polynucleotide
gaagtgcagcttgtcgaatccggggggggactggtcaagccgggcggatcactgagactgtcctgcgccgcgagcggcttcacgttctcctcctactccatgaactgggtccgccaagcccccgggaagggactggaatgggtgtcctctatctcctcgtcgtcgtcctacatctactacgccgactccgtgaagggaagattcaccatttcccgcgacaacgcaaagaactcactgtacttgcaaatgaactcactccgggccgaagatactgctgtgtactattgcgccaagactattgccgccgtctacgctttcgacatctggggccagggaaccaccgtgactgtgtcgtccggtggtggtggctcgggcggaggaggaagcggcggcggggggtccgagattgtgctgacccagtcgccactgagcctccctgtgacccccgaggaacccgccagcatcagctgccggtccagccagtccctgctccactccaacggatacaattacctcgattggtaccttcagaagcctggacaaagcccgcagctgctcatctacttgggatcaaaccgcgcgtcaggagtgcctgaccggttctccggctcgggcagcggtaccgatttcaccctgaaaatctccagggtggaggcagaggacgtgggagtgtattactgtatgcaggcgctgcagactccgtacacatttgggcagggcaccaagctggagatcaag

SEQ ID NO: 1071 - protein, 119 aa, Artificial Sequence
  Description of Artificial Sequence: Synthetic polypeptide
EVQLVESGGGLVKPGGSLRLSCAASGFTFSSYSMNWVRQAPGKGLEWVSSISSSSSYIYYADSVKGRFTISRDNAKNSLYLQMNSLRAEDTAVYYCAKTIAAVYAFDIWGQGTTVTVSS

SEQ ID NO: 1072 - protein, 112 aa, Artificial Sequence
  Description of Artificial Sequence: Synthetic polypeptide
EIVLTQSPLSLPVTPEEPASISCRSSQSLLHSNGYNYLDWYLQKPGQSPQLLIYLGSNRASGVPDRFSGSGSGTDFTLKISRVEAEDVGVYYCMQALQTPYTFGQGTKLEIK

SEQ ID NO: 1073 - protein, 490 aa, Artificial Sequence
  Description of Artificial Sequence: Synthetic polypeptide
MALPVTALLLPLALLLHAARPEVQLVESGGGLVKPGGSLRLSCAASGFTFSSYSMNWVRQAPGKGLEWVSSISSSSSYIYYADSVKGRFTISRDNAKNSLYLQMNSLRAEDTAVYYCAKTIAAVYAFDIWGQGTTVTVSSGGGGSGGGGSGGGGSEIVLTQSPLSLPVTPEEPASISCRSSQSLLHSNGYNYLDWYLQKPGQSPQLLIYLGSNRASGVPDRFSGSGSGTDFTLKISRVEAEDVGVYYCMQALQTPYTFGQGTKLEIKTTTPAPRPPTPAPTIASQPLSLRPEACRPAAGGAVHTRGLDFACDIYIWAPLAGTCGVLLLSLVITLYCKRGRKKLLYIFKQPFMRPVQTTQEEDGCSCRFPEEEEGGCELRVKFSRSADAPAYKQGQNQLYNELNLGRREEYDVLDKRRGRDPEMGGKPRRKNPQEGLYNELQKDKMAEAYSEIGMKGERRRGKGHDGLYQGLSTATKDTYDALHMQALPPR

SEQ ID NO: 1074 - DNA, 1470 bp, Artificial Sequence
  Description of Artificial Sequence: Synthetic polynucleotide
atggccctccctgtcaccgccctgctgcttccgctggctcttctgctccacgccgctcggcccgaagtgcagcttgtcgaatccggggggggactggtcaagccgggcggatcactgagactgtcctgcgccgcgagcggcttcacgttctcctcctactccatgaactgggtccgccaagcccccgggaagggactggaatgggtgtcctctatctcctcgtcgtcgtcctacatctactacgccgactccgtgaagggaagattcaccatttcccgcgacaacgcaaagaactcactgtacttgcaaatgaactcactccgggccgaagatactgctgtgtactattgcgccaagactattgccgccgtctacgctttcgacatctggggccagggaaccaccgtgactgtgtcgtccggtggtggtggctcgggcggaggaggaagcggcggcggggggtccgagattgtgctgacccagtcgccactgagcctccctgtgacccccgaggaacccgccagcatcagctgccggtccagccagtccctgctccactccaacggatacaattacctcgattggtaccttcagaagcctggacaaagcccgcagctgctcatctacttgggatcaaaccgcgcgtcaggagtgcctgaccggttctccggctcgggcagcggtaccgatttcaccctgaaaatctccagggtggaggcagaggacgtgggagtgtattactgtatgcaggcgctgcagactccgtacacatttgggcagggcaccaagctggagatcaagaccactaccccagcaccgaggccacccaccccggctcctaccatcgcctcccagcctctgtccctgcgtccggaggcatgtagacccgcagctggtggggccgtgcatacccggggtcttgacttcgcctgcgatatctacatttgggcccctctggctggtacttgcggggtcctgctgctttcactcgtgatcactctttactgtaagcgcggtcggaagaagctgctgtacatctttaagcaacccttcatgaggcctgtgcagactactcaagaggaggacggctgttcatgccggttcccagaggaggaggaaggcggctgcgaactgcgcgtgaaattcagccgcagcgcagatgctccagcctacaagcaggggcagaaccagctctacaacgaactcaatcttggtcggagagaggagtacgacgtgctggacaagcggagaggacgggacccagaaatgggcgggaagccgcgcagaaagaatccccaagagggcctgtacaacgagctccaaaaggataagatggcagaagcctatagcgagattggtatgaaaggggaacgcagaagaggcaaaggccacgacggactgtaccagggactcagcaccgccaccaaggacacctatgacgctcttcacatgcaggccctgccgcctcgg

SEQ ID NO: 1075 - protein, 240 aa, Artificial Sequence
  Description of Artificial Sequence: Synthetic polypeptide
EVQLVESGGGLVKPGGSLRLSCAASGFTFSDYYMSWIRQAPGKGLEWVSYISSSGSTIYYADSVKGRFTISRDNAKNSLYLQMNSLRAEDTAVYYCARDLRGAFDIWGQGTMVTVSSGGGGSGGGGSGGGGSSYVLTQSPSVSAAPGYTATISCGGNNIGTKSVHWYQQKPGQAPLLVIRDDSVRPSKIPGRFSGSNSGNMATLTISGVQAGDEADFYCQVWDSDSEHVVFGGGTKLTVL

SEQ ID NO: 1076 - DNA, 720 bp, Artificial Sequence
  Description of Artificial Sequence: Synthetic polynucleotide
gaagtccagctcgtggagtccggcggaggccttgtgaagcctggaggttcgctgagactgtcctgcgccgcctccggcttcaccttctccgactactacatgtcctggatcagacaggccccgggaaagggcctggaatgggtgtcctacatctcgtcatcgggcagcactatctactacgcggactcagtgaaggggcggttcaccatttcccgggataacgcgaagaactcgctgtatctgcaaatgaactcactgagggccgaggacaccgccgtgtactactgcgcccgcgatctccgcggggcatttgacatctggggacagggaaccatggtcacagtgtccagcggagggggaggatcgggtggcggaggttccgggggtggaggctcctcctacgtgctgactcagagcccaagcgtcagcgctgcgcccggttacacggcaaccatctcctgtggcggaaacaacattgggaccaagtctgtgcactggtatcagcagaagccgggccaagctcccctgttggtgatccgcgatgactccgtgcggcctagcaaaattccgggacggttctccggctccaacagcggcaatatggccactctcaccatctcgggagtgcaggccggagatgaagccgacttctactgccaagtctgggactcagactccgagcatgtggtgttcgggggcggaaccaagctgactgtgctc

SEQ ID NO: 1077 - protein, 117 aa, Artificial Sequence
  Description of Artificial Sequence: Synthetic polypeptide
EVQLVESGGGLVKPGGSLRLSCAASGFTFSDYYMSWIRQAPGKGLEWVSYISSSGSTIYYADSVKGRFTISRDNAKNSLYLQMNSLRAEDTAVYYCARDLRGAFDIWGQGTMVTVSS

SEQ ID NO: 1078 - protein, 108 aa, Artificial Sequence
  Description of Artificial Sequence: Synthetic polypeptide
SYVLTQSPSVSAAPGYTATISCGGNNIGTKSVHWYQQKPGQAPLLVIRDDSVRPSKIPGRFSGSNSGNMATLTISGVQAGDEADFYCQVWDSDSEHVVFGGGTKLTVL

SEQ ID NO: 1079 - protein, 484 aa, Artificial Sequence
  Description of Artificial Sequence: Synthetic polypeptide
MALPVTALLLPLALLLHAARPEVQLVESGGGLVKPGGSLRLSCAASGFTFSDYYMSWIRQAPGKGLEWVSYISSSGSTIYYADSVKGRFTISRDNAKNSLYLQMNSLRAEDTAVYYCARDLRGAFDIWGQGTMVTVSSGGGGSGGGGSGGGGSSYVLTQSPSVSAAPGYTATISCGGNNIGTKSVHWYQQKPGQAPLLVIRDDSVRPSKIPGRFSGSNSGNMATLTISGVQAGDEADFYCQVWDSDSEHVVFGGGTKLTVLTTTPAPRPPTPAPTIASQPLSLRPEACRPAAGGAVHTRGLDFACDIYIWAPLAGTCGVLLLSLVITLYCKRGRKKLLYIFKQPFMRPVQTTQEEDGCSCRFPEEEEGGCELRVKFSRSADAPAYKQGQNQLYNELNLGRREEYDVLDKRRGRDPEMGGKPRRKNPQEGLYNELQKDKMAEAYSEIGMKGERRRGKGHDGLYQGLSTATKDTYDALHMQALPPR

SEQ ID NO: 1080 - DNA, 1452 bp, Artificial Sequence
  Description of Artificial Sequence: Synthetic polynucleotide
atggccctccctgtcaccgccctgctgcttccgctggctcttctgctccacgccgctcggcccgaagtccagctcgtggagtccggcggaggccttgtgaagcctggaggttcgctgagactgtcctgcgccgcctccggcttcaccttctccgactactacatgtcctggatcagacaggccccgggaaagggcctggaatgggtgtcctacatctcgtcatcgggcagcactatctactacgcggactcagtgaaggggcggttcaccatttcccgggataacgcgaagaactcgctgtatctgcaaatgaactcactgagggccgaggacaccgccgtgtactactgcgcccgcgatctccgcggggcatttgacatctggggacagggaaccatggtcacagtgtccagcggagggggaggatcgggtggcggaggttccgggggtggaggctcctcctacgtgctgactcagagcccaagcgtcagcgctgcgcccggttacacggcaaccatctcctgtggcggaaacaacattgggaccaagtctgtgcactggtatcagcagaagccgggccaagctcccctgttggtgatccgcgatgactccgtgcggcctagcaaaattccgggacggttctccggctccaacagcggcaatatggccactctcaccatctcgggagtgcaggccggagatgaagccgacttctactgccaagtctgggactcagactccgagcatgtggtgttcgggggcggaaccaagctgactgtgctcaccactaccccagcaccgaggccacccaccccggctcctaccatcgcctcccagcctctgtccctgcgtccggaggcatgtagacccgcagctggtggggccgtgcatacccggggtcttgacttcgcctgcgatatctacatttgggcccctctggctggtacttgcggggtcctgctgctttcactcgtgatcactctttactgtaagcgcggtcggaagaagctgctgtacatctttaagcaacccttcatgaggcctgtgcagactactcaagaggaggacggctgttcatgccggttcccagaggaggaggaaggcggctgcgaactgcgcgtgaaattcagccgcagcgcagatgctccagcctacaagcaggggcagaaccagctctacaacgaactcaatcttggtcggagagaggagtacgacgtgctggacaagcggagaggacgggacccagaaatgggcgggaagccgcgcagaaagaatccccaagagggcctgtacaacgagctccaaaaggataagatggcagaagcctatagcgagattggtatgaaaggggaacgcagaagaggcaaaggccacgacggactgtaccagggactcagcaccgccaccaaggacacctatgacgctcttcacatgcaggccctgccgcctcgg

SEQ ID NO: 1081 - protein, 241 aa, Artificial Sequence
  Description of Artificial Sequence: Synthetic polypeptide
QVQLVQSGAEVKKPGASVKVSCKPSGYTVTSHYIHWVRRAPGQGLEWMGMINPSGGVTAYSQTLQGRVTMTSDTSSSTVYMELSSLRSEDTAMYYCAREGSGSGWYFDFWGRGTLVTVSSGGGGSGGGGSGGGGSSYVLTQPPSVSVSPGQTASITCSGDGLSKKYVSWYQQKAGQSPVVLISRDKERPSGIPDRFSGSNSADTATLTISGTQAMDEADYYCQAWDDTTVVFGGGTKLTVL

SEQ ID NO: 1082 - DNA, 723 bp, Artificial Sequence
  Description of Artificial Sequence: Synthetic polynucleotide
caagtgcagctggtgcagagcggggccgaagtcaagaagccgggagcctccgtgaaagtgtcctgcaagccttcgggatacaccgtgacctcccactacattcattgggtccgccgcgcccccggccaaggactcgagtggatgggcatgatcaaccctagcggcggagtgaccgcgtacagccagacgctgcagggacgcgtgactatgacctcggatacctcctcctccaccgtctatatggaactgtccagcctgcggtccgaggataccgccatgtactactgcgcccgggaaggatcaggctccgggtggtatttcgacttctggggaagaggcaccctcgtgactgtgtcatctgggggagggggttccggtggtggcggatcgggaggaggcggttcatcctacgtgctgacccagccaccctccgtgtccgtgagccccggccagactgcatcgattacatgtagcggcgacggcctctccaagaaatacgtgtcgtggtaccagcagaaggccggacagagcccggtggtgctgatctcaagagataaggagcggcctagcggaatcccggacaggttctcgggttccaactccgcggacactgctactctgaccatctcggggacccaggctatggacgaagccgattactactgccaagcctgggacgacactactgtcgtgtttggagggggcaccaagttgaccgtcctt

SEQ ID NO: 1083 - protein, 120 aa, Artificial Sequence
  Description of Artificial Sequence: Synthetic polypeptide
QVQLVQSGAEVKKPGASVKVSCKPSGYTVTSHYIHWVRRAPGQGLEWMGMINPSGGVTAYSQTLQGRVTMTSDTSSSTVYMELSSLRSEDTAMYYCAREGSGSGWYFDFWGRGTLVTVSS

SEQ ID NO: 1084 - protein, 106 aa, Artificial Sequence
  Description of Artificial Sequence: Synthetic polypeptide
SYVLTQPPSVSVSPGQTASITCSGDGLSKKYVSWYQQKAGQSPVVLISRDKERPSGIPDRFSGSNSADTATLTISGTQAMDEADYYCQAWDDTTVVFGGGTKLTVL

SEQ ID NO: 1085 - protein, 485 aa, Artificial Sequence
  Description of Artificial Sequence: Synthetic polypeptide
MALPVTALLLPLALLLHAARPQVQLVQSGAEVKKPGASVKVSCKPSGYTVTSHYIHWVRRAPGQGLEWMGMINPSGGVTAYSQTLQGRVTMTSDTSSSTVYMELSSLRSEDTAMYYCAREGSGSGWYFDFWGRGTLVTVSSGGGGSGGGGSGGGGSSYVLTQPPSVSVSPGQTASITCSGDGLSKKYVSWYQQKAGQSPVVLISRDKERPSGIPDRFSGSNSADTATLTISGTQAMDEADYYCQAWDDTTVVFGGGTKLTVLTTTPAPRPPTPAPTIASQPLSLRPEACRPAAGGAVHTRGLDFACDIYIWAPLAGTCGVLLLSLVITLYCKRGRKKLLYIFKQPFMRPVQTTQEEDGCSCRFPEEEEGGCELRVKFSRSADAPAYKQGQNQLYNELNLGRREEYDVLDKRRGRDPEMGGKPRRKNPQEGLYNELQKDKMAEAYSEIGMKGERRRGKGHDGLYQGLSTATKDTYDALHMQALPPR

SEQ ID NO: 1086 - DNA, 1455 bp, Artificial Sequence
  Description of Artificial Sequence: Synthetic polynucleotide
atggccctccctgtcaccgccctgctgcttccgctggctcttctgctccacgccgctcggccccaagtgcagctggtgcagagcggggccgaagtcaagaagccgggagcctccgtgaaagtgtcctgcaagccttcgggatacaccgtgacctcccactacattcattgggtccgccgcgcccccggccaaggactcgagtggatgggcatgatcaaccctagcggcggagtgaccgcgtacagccagacgctgcagggacgcgtgactatgacctcggatacctcctcctccaccgtctatatggaactgtccagcctgcggtccgaggataccgccatgtactactgcgcccgggaaggatcaggctccgggtggtatttcgacttctggggaagaggcaccctcgtgactgtgtcatctgggggagggggttccggtggtggcggatcgggaggaggcggttcatcctacgtgctgacccagccaccctccgtgtccgtgagccccggccagactgcatcgattacatgtagcggcgacggcctctccaagaaatacgtgtcgtggtaccagcagaaggccggacagagcccggtggtgctgatctcaagagataaggagcggcctagcggaatcccggacaggttctcgggttccaactccgcggacactgctactctgaccatctcggggacccaggctatggacgaagccgattactactgccaagcctgggacgacactactgtcgtgtttggagggggcaccaagttgaccgtccttaccactaccccagcaccgaggccacccaccccggctcctaccatcgcctcccagcctctgtccctgcgtccggaggcatgtagacccgcagctggtggggccgtgcatacccggggtcttgacttcgcctgcgatatctacatttgggcccctctggctggtacttgcggggtcctgctgctttcactcgtgatcactctttactgtaagcgcggtcggaagaagctgctgtacatctttaagcaacccttcatgaggcctgtgcagactactcaagaggaggacggctgttcatgccggttcccagaggaggaggaaggcggctgcgaactgcgcgtgaaattcagccgcagcgcagatgctccagcctacaagcaggggcagaaccagctctacaacgaactcaatcttggtcggagagaggagtacgacgtgctggacaagcggagaggacgggacccagaaatgggcgggaagccgcgcagaaagaatccccaagagggcctgtacaacgagctccaaaaggataagatggcagaagcctatagcgagattggtatgaaaggggaacgcagaagaggcaaaggccacgacggactgtaccagggactcagcaccgccaccaaggacacctatgacgctcttcacatgcaggccctgccgcctcgg

SEQ ID NO: 1087 - protein, 245 aa, Artificial Sequence
  Description of Artificial Sequence: Synthetic polypeptide
QVQLQESGPGLVKPSQTLSLTCTVSGGSISSGGYYWSWIRQHPGKGLEWIGYIYYSGSTYYNPSLKSRVTISVDTSKNQFSLKLSSVTAADTAVYYCARAGIAARLRGAFDIWGQGTMVTVSSGGGGSGGGGSGGGGSDIVMTQSPSSVSASVGDRVIITCRASQGIRNWLAWYQQKPGKAPNLLIYAASNLQSGVPSRFSGSGSGADFTLTISSLQPEDVATYYCQKYNSAPFTFGPGTKVDIK

SEQ ID NO: 1088 - DNA, 735 bp, Artificial Sequence
  Description of Artificial Sequence: Synthetic polynucleotide
caagtgcagcttcaggagagcggcccgggactcgtgaagccgtcccagaccctgtccctgacttgcaccgtgtcgggaggaagcatctcgagcggaggctactattggtcgtggattcggcagcaccctggaaagggcctggaatggatcggctacatctactactccggctcgacctactacaacccatcgctgaagtccagagtgacaatctcagtggacacgtccaagaatcagttcagcctgaagctctcttccgtgactgcggccgacaccgccgtgtactactgcgcacgcgctggaattgccgcccggctgaggggtgccttcgacatttggggacagggcaccatggtcaccgtgtcctccggcggcggaggttccgggggtggaggctcaggaggaggggggtccgacatcgtcatgactcagtcgccctcaagcgtcagcgcgtccgtcggggacagagtgatcatcacctgtcgggcgtcccagggaattcgcaactggctggcctggtatcagcagaagcccggaaaggcccccaacctgttgatctacgccgcctcaaacctccaatccggggtgccgagccgcttcagcggctccggttcgggtgccgatttcactctgaccatctcctccctgcaacctgaagatgtggctacctactactgccaaaagtacaactccgcaccttttactttcggaccggggaccaaagtggacattaag

SEQ ID NO: 1089 - protein, 123 aa, Artificial Sequence
  Description of Artificial Sequence: Synthetic polypeptide
QVQLQESGPGLVKPSQTLSLTCTVSGGSISSGGYYWSWIRQHPGKGLEWIGYIYYSGSTYYNPSLKSRVTISVDTSKNQFSLKLSSVTAADTAVYYCARAGIAARLRGAFDIWGQGTMVTVSS

SEQ ID NO: 1090 - protein, 107 aa, Artificial Sequence
  Description of Artificial Sequence: Synthetic polypeptide
DIVMTQSPSSVSASVGDRVIITCRASQGIRNWLAWYQQKPGKAPNLLIYAASNLQSGVPSRFSGSGSGADFTLTISSLQPEDVATYYCQKYNSAPFTFGPGTKVDIK

SEQ ID NO: 1091 - protein, 489 aa, Artificial Sequence
  Description of Artificial Sequence: Synthetic polypeptide
MALPVTALLLPLALLLHAARPQVQLQESGPGLVKPSQTLSLTCTVSGGSISSGGYYWSWIRQHPGKGLEWIGYIYYSGSTYYNPSLKSRVTISVDTSKNQFSLKLSSVTAADTAVYYCARAGIAARLRGAFDIWGQGTMVTVSSGGGGSGGGGSGGGGSDIVMTQSPSSVSASVGDRVIITCRASQGIRNWLAWYQQKPGKAPNLLIYAASNLQSGVPSRFSGSGSGADFTLTISSLQPEDVATYYCQKYNSAPFTFGPGTKVDIKTTTPAPRPPTPAPTIASQPLSLRPEACRPAAGGAVHTRGLDFACDIYIWAPLAGTCGVLLLSLVITLYCKRGRKKLLYIFKQPFMRPVQTTQEEDGCSCRFPEEEEGGCELRVKFSRSADAPAYKQGQNQLYNELNLGRREEYDVLDKRRGRDPEMGGKPRRKNPQEGLYNELQKDKMAEAYSEIGMKGERRRGKGHDGLYQGLSTATKDTYDALHMQALPPR

SEQ ID NO: 1092 - DNA, 1467 bp, Artificial Sequence
  Description of Artificial Sequence: Synthetic polynucleotide
atggccctccctgtcaccgccctgctgcttccgctggctcttctgctccacgccgctcggccccaagtgcagcttcaggagagcggcccgggactcgtgaagccgtcccagaccctgtccctgacttgcaccgtgtcgggaggaagcatctcgagcggaggctactattggtcgtggattcggcagcaccctggaaagggcctggaatggatcggctacatctactactccggctcgacctactacaacccatcgctgaagtccagagtgacaatctcagtggacacgtccaagaatcagttcagcctgaagctctcttccgtgactgcggccgacaccgccgtgtactactgcgcacgcgctggaattgccgcccggctgaggggtgccttcgacatttggggacagggcaccatggtcaccgtgtcctccggcggcggaggttccgggggtggaggctcaggaggaggggggtccgacatcgtcatgactcagtcgccctcaagcgtcagcgcgtccgtcggggacagagtgatcatcacctgtcgggcgtcccagggaattcgcaactggctggcctggtatcagcagaagcccggaaaggcccccaacctgttgatctacgccgcctcaaacctccaatccggggtgccgagccgcttcagcggctccggttcgggtgccgatttcactctgaccatctcctccctgcaacctgaagatgtggctacctactactgccaaaagtacaactccgcaccttttactttcggaccggggaccaaagtggacattaagaccactaccccagcaccgaggccacccaccccggctcctaccatcgcctcccagcctctgtccctgcgtccggaggcatgtagacccgcagctggtggggccgtgcatacccggggtcttgacttcgcctgcgatatctacatttgggcccctctggctggtacttgcggggtcctgctgctttcactcgtgatcactctttactgtaagcgcggtcggaagaagctgctgtacatctttaagcaacccttcatgaggcctgtgcagactactcaagaggaggacggctgttcatgccggttcccagaggaggaggaaggcggctgcgaactgcgcgtgaaattcagccgcagcgcagatgctccagcctacaagcaggggcagaaccagctctacaacgaactcaatcttggtcggagagaggagtacgacgtgctggacaagcggagaggacgggacccagaaatgggcgggaagccgcgcagaaagaatccccaagagggcctgtacaacgagctccaaaaggataagatggcagaagcctatagcgagattggtatgaaaggggaacgcagaagaggcaaaggccacgacggactgtaccagggactcagcaccgccaccaaggacacctatgacgctcttcacatgcaggccctgccgcctcgg

SEQ ID NO: 1093 - protein, 253 aa, Artificial Sequence
  Description of Artificial Sequence: Synthetic polypeptide
QVQLVQSGAEVKKPGSSVKVSCKASGGTFSSYAISWVRQAPGQGLEWMGGIIPIFGTANYAQKFQGRVTITADESTSTAYMELSSLRSEDTAVYYCARRGGYQLLRWDVGLLRSAFDIWGQGTMVTVSSGGGGSGGGGSGGGGSSYVLTQPPSVSVAPGQTARITCGGNNIGSKSVHWYQQKPGQAPVLVLYGKNNRPSGVPDRFSGSRSGTTASLTITGAQAEDEADYYCSSRDSSGDHLRVFGTGTKVTVL

SEQ ID NO: 1094 - DNA, 759 bp, Artificial Sequence
  Description of Artificial Sequence: Synthetic polynucleotide
caagtgcagctggtccagtcgggcgccgaggtcaagaagcccgggagctctgtgaaagtgtcctgcaaggcctccgggggcacctttagctcctacgccatctcctgggtccgccaagcaccgggtcaaggcctggagtggatggggggaattatccctatcttcggcactgccaactacgcccagaagttccagggacgcgtgaccattaccgcggacgaatccacctccaccgcttatatggagctgtccagcttgcgctcggaagataccgccgtgtactactgcgcccggaggggtggataccagctgctgagatgggacgtgggcctcctgcggtcggcgttcgacatctggggccagggcactatggtcactgtgtccagcggaggaggcggatcgggaggcggcggatcagggggaggcggttccagctacgtgcttactcaacccccttcggtgtccgtggccccgggacagaccgccagaatcacttgcggaggaaacaacattgggtccaagagcgtgcattggtaccagcagaagccaggacaggcccctgtgctggtgctctacgggaagaacaatcggcccagcggagtgccggacaggttctcgggttcacgctccggtacaaccgcttcactgactatcaccggggcccaggcagaggatgaagcggactactactgttcctcccgggattcatccggcgaccacctccgggtgttcggaaccggaacgaaggtcaccgtgctg

SEQ ID NO: 1095 - protein, 129 aa, Artificial Sequence
  Description of Artificial Sequence: Synthetic polypeptide
QVQLVQSGAEVKKPGSSVKVSCKASGGTFSSYAISWVRQAPGQGLEWMGGIIPIFGTANYAQKFQGRVTITADESTSTAYMELSSLRSEDTAVYYCARRGGYQLLRWDVGLLRSAFDIWGQGTMVTVSS

SEQ ID NO: 1096 - protein, 109 aa, Artificial Sequence
  Description of Artificial Sequence: Synthetic polypeptide
SYVLTQPPSVSVAPGQTARITCGGNNIGSKSVHWYQQKPGQAPVLVLYGKNNRPSGVPDRFSGSRSGTTASLTITGAQAEDEADYYCSSRDSSGDHLRVFGTGTKVTVL

SEQ ID NO: 1097 - protein, 497 aa, Artificial Sequence
  Description of Artificial Sequence: Synthetic polypeptide
MALPVTALLLPLALLLHAARPQVQLVQSGAEVKKPGSSVKVSCKASGGTFSSYAISWVRQAPGQGLEWMGGIIPIFGTANYAQKFQGRVTITADESTSTAYMELSSLRSEDTAVYYCARRGGYQLLRWDVGLLRSAFDIWGQGTMVTVSSGGGGSGGGGSGGGGSSYVLTQPPSVSVAPGQTARITCGGNNIGSKSVHWYQQKPGQAPVLVLYGKNNRPSGVPDRFSGSRSGTTASLTITGAQAEDEADYYCSSRDSSGDHLRVFGTGTKVTVLTTTPAPRPPTPAPTIASQPLSLRPEACRPAAGGAVHTRGLDFACDIYIWAPLAGTCGVLLLSLVITLYCKRGRKKLLYIFKQPFMRPVQTTQEEDGCSCRFPEEEEGGCELRVKFSRSADAPAYKQGQNQLYNELNLGRREEYDVLDKRRGRDPEMGGKPRRKNPQEGLYNELQKDKMAEAYSEIGMKGERRRGKGHDGLYQGLSTATKDTYDALHMQALPPR

SEQ ID NO: 1098 - DNA, 1491 bp, Artificial Sequence
  Description of Artificial Sequence: Synthetic polynucleotide
atggccctccctgtcaccgccctgctgcttccgctggctcttctgctccacgccgctcggccccaagtgcagctggtccagtcgggcgccgaggtcaagaagcccgggagctctgtgaaagtgtcctgcaaggcctccgggggcacctttagctcctacgccatctcctgggtccgccaagcaccgggtcaaggcctggagtggatggggggaattatccctatcttcggcactgccaactacgcccagaagttccagggacgcgtgaccattaccgcggacgaatccacctccaccgcttatatggagctgtccagcttgcgctcggaagataccgccgtgtactactgcgcccggaggggtggataccagctgctgagatgggacgtgggcctcctgcggtcggcgttcgacatctggggccagggcactatggtcactgtgtccagcggaggaggcggatcgggaggcggcggatcagggggaggcggttccagctacgtgcttactcaacccccttcggtgtccgtggccccgggacagaccgccagaatcacttgcggaggaaacaacattgggtccaagagcgtgcattggtaccagcagaagccaggacaggcccctgtgctggtgctctacgggaagaacaatcggcccagcggagtgccggacaggttctcgggttcacgctccggtacaaccgcttcactgactatcaccggggcccaggcagaggatgaagcggactactactgttcctcccgggattcatccggcgaccacctccgggtgttcggaaccggaacgaaggtcaccgtgctgaccactaccccagcaccgaggccacccaccccggctcctaccatcgcctcccagcctctgtccctgcgtccggaggcatgtagacccgcagctggtggggccgtgcatacccggggtcttgacttcgcctgcgatatctacatttgggcccctctggctggtacttgcggggtcctgctgctttcactcgtgatcactctttactgtaagcgcggtcggaagaagctgctgtacatctttaagcaacccttcatgaggcctgtgcagactactcaagaggaggacggctgttcatgccggttcccagaggaggaggaaggcggctgcgaactgcgcgtgaaattcagccgcagcgcagatgctccagcctacaagcaggggcagaaccagctctacaacgaactcaatcttggtcggagagaggagtacgacgtgctggacaagcggagaggacgggacccagaaatgggcgggaagccgcgcagaaagaatccccaagagggcctgtacaacgagctccaaaaggataagatggcagaagcctatagcgagattggtatgaaaggggaacgcagaagaggcaaaggccacgacggactgtaccagggactcagcaccgccaccaaggacacctatgacgctcttcacatgcaggccctgccgcctcgg

SEQ ID NO: 1099 - protein, 248 aa, Artificial Sequence
  Description of Artificial Sequence: Synthetic polypeptide
EVQLQQSGPGLVKPSQTLSLTCAISGDSVSSNSAAWNWIRQSPSRGLEWLGRTYYRSKWYSFYAISLKSRIIINPDTSKNQFSLQLKSVTPEDTAVYYCARSSPEGLFLYWFDPWGQGTLVTVSSGGDGSGGGGSGGGGSSSELTQDPAVSVALGQTIRITCQGDSLGNYYATWYQQKPGQAPVLVIYGTNNRPSGIPDRFSASSSGNTASLTITGAQAEDEADYYCNSRDSSGHHLLFGTGTKVTVL

SEQ ID NO: 1100 - DNA, 744 bp, Artificial Sequence
  Description of Artificial Sequence: Synthetic polynucleotide
gaagtgcagctccaacagtcaggaccggggctcgtgaagccatcccagaccctgtccctgacttgtgccatctcgggagatagcgtgtcatcgaactccgccgcctggaactggattcggcagagcccgtcccgcggactggagtggcttggaaggacctactaccggtccaagtggtactctttctacgcgatctcgctgaagtcccgcattatcattaaccctgatacctccaagaatcagttctccctccaactgaaatccgtcacccccgaggacacagcagtgtattactgcgcacggagcagccccgaaggactgttcctgtattggtttgacccctggggccaggggactcttgtgaccgtgtcgagcggcggagatgggtccggtggcggtggttcggggggcggcggatcatcatccgaactgacccaggacccggctgtgtccgtggcgctgggacaaaccatccgcattacgtgccagggagactccctgggcaactactacgccacttggtaccagcagaagccgggccaagcccctgtgttggtcatctacgggaccaacaacagaccttccggcatccccgaccggttcagcgcttcgtcctccggcaacactgccagcctgaccatcactggagcgcaggccgaagatgaggccgactactactgcaacagcagagactcctcgggtcatcacctcttgttcggaactggaaccaaggtcaccgtgctg

SEQ ID NO: 1101 - protein, 125 aa, Artificial Sequence
  Description of Artificial Sequence: Synthetic polypeptide
EVQLQQSGPGLVKPSQTLSLTCAISGDSVSSNSAAWNWIRQSPSRGLEWLGRTYYRSKWYSFYAISLKSRIIINPDTSKNQFSLQLKSVTPEDTAVYYCARSSPEGLFLYWFDPWGQGTLVTVSS

SEQ ID NO: 1102 - protein, 108 aa, Artificial Sequence
  Description of Artificial Sequence: Synthetic polypeptide
SSELTQDPAVSVALGQTIRITCQGDSLGNYYATWYQQKPGQAPVLVIYGTNNRPSGIPDRFSASSSGNTASLTITGAQAEDEADYYCNSRDSSGHHLLFGTGTKVTVL

SEQ ID NO: 1103 - protein, 492 aa, Artificial Sequence
  Description of Artificial Sequence: Synthetic polypeptide
MALPVTALLLPLALLLHAARPEVQLQQSGPGLVKPSQTLSLTCAISGDSVSSNSAAWNWIRQSPSRGLEWLGRTYYRSKWYSFYAISLKSRIIINPDTSKNQFSLQLKSVTPEDTAVYYCARSSPEGLFLYWFDPWGQGTLVTVSSGGDGSGGGGSGGGGSSSELTQDPAVSVALGQTIRITCQGDSLGNYYATWYQQKPGQAPVLVIYGTNNRPSGIPDRFSASSSGNTASLTITGAQAEDEADYYCNSRDSSGHHLLFGTGTKVTVLTTTPAPRPPTPAPTIASQPLSLRPEACRPAAGGAVHTRGLDFACDIYIWAPLAGTCGVLLLSLVITLYCKRGRKKLLYIFKQPFMRPVQTTQEEDGCSCRFPEEEEGGCELRVKFSRSADAPAYKQGQNQLYNELNLGRREEYDVLDKRRGRDPEMGGKPRRKNPQEGLYNELQKDKMAEAYSEIGMKGERRRGKGHDGLYQGLSTATKDTYDALHMQALPPR

SEQ ID NO: 1104 - DNA, 1476 bp, Artificial Sequence
  Description of Artificial Sequence: Synthetic polynucleotide
atggccctccctgtcaccgccctgctgcttccgctggctcttctgctccacgccgctcggcccgaagtgcagctccaacagtcaggaccggggctcgtgaagccatcccagaccctgtccctgacttgtgccatctcgggagatagcgtgtcatcgaactccgccgcctggaactggattcggcagagcccgtcccgcggactggagtggcttggaaggacctactaccggtccaagtggtactctttctacgcgatctcgctgaagtcccgcattatcattaaccctgatacctccaagaatcagttctccctccaactgaaatccgtcacccccgaggacacagcagtgtattactgcgcacggagcagccccgaaggactgttcctgtattggtttgacccctggggccaggggactcttgtgaccgtgtcgagcggcggagatgggtccggtggcggtggttcggggggcggcggatcatcatccgaactgacccaggacccggctgtgtccgtggcgctgggacaaaccatccgcattacgtgccagggagactccctgggcaactactacgccacttggtaccagcagaagccgggccaagcccctgtgttggtcatctacgggaccaacaacagaccttccggcatccccgaccggttcagcgcttcgtcctccggcaacactgccagcctgaccatcactggagcgcaggccgaagatgaggccgactactactgcaacagcagagactcctcgggtcatcacctcttgttcggaactggaaccaaggtcaccgtgctgaccactaccccagcaccgaggccacccaccccggctcctaccatcgcctcccagcctctgtccctgcgtccggaggcatgtagacccgcagctggtggggccgtgcatacccggggtcttgacttcgcctgcgatatctacatttgggcccctctggctggtacttgcggggtcctgctgctttcactcgtgatcactctttactgtaagcgcggtcggaagaagctgctgtacatctttaagcaacccttcatgaggcctgtgcagactactcaagaggaggacggctgttcatgccggttcccagaggaggaggaaggcggctgcgaactgcgcgtgaaattcagccgcagcgcagatgctccagcctacaagcaggggcagaaccagctctacaacgaactcaatcttggtcggagagaggagtacgacgtgctggacaagcggagaggacgggacccagaaatgggcgggaagccgcgcagaaagaatccccaagagggcctgtacaacgagctccaaaaggataagatggcagaagcctatagcgagattggtatgaaaggggaacgcagaagaggcaaaggccacgacggactgtaccagggactcagcaccgccaccaaggacacctatgacgctcttcacatgcaggccctgccgcctcgg

SEQ ID NO: 1105 - protein, 246 aa, Artificial Sequence
  Description of Artificial Sequence: Synthetic polypeptide
EVQLVESGGGLVQPGGSLRLSCAASGFTFSSYAMSWVRQAPGKGLEWVSAISGSGGSTYYADSVKGRFTISRDNSKNTLYLQMNSLRAEDTAVYYCAKVEGSGSLDYWGQGTLVTVSSGGGGSGGGGSGGGGSEIVMTQSPGTLSLSPGERATLSCRASQSVSSAYLAWYQQKPGQPPRLLISGASTRATGIPDRFGGSGSGTDFTLTISRLEPEDFAVYYCQHYGSSFNGSSLFTFGQGTRLEIK

SEQ ID NO: 1106 - DNA, 738 bp, Artificial Sequence
  Description of Artificial Sequence: Synthetic polynucleotide
gaagtgcagctcgtggagtcaggaggcggcctggtccagccgggagggtcccttagactgtcatgcgccgcaagcggattcactttctcctcctatgccatgagctgggtccgccaagcccccggaaagggactggaatgggtgtccgccatctcggggtctggaggctcaacttactacgctgactccgtgaagggacggttcaccattagccgcgacaactccaagaacaccctctacctccaaatgaactccctgcgggccgaggataccgccgtctactactgcgccaaagtggaaggttcaggatcgctggactactggggacagggtactctcgtgaccgtgtcatcgggcggaggaggttccggcggtggcggctccggcggcggagggtcggagatcgtgatgacccagagccctggtactctgagcctttcgccgggagaaagggccaccctgtcctgccgcgcttcccaatccgtgtcctccgcgtacttggcgtggtaccagcagaagccgggacagccccctcggctgctgatcagcggggccagcacccgggcaaccggaatcccagacagattcgggggttccggcagcggcacagatttcaccctgactatttcgaggttggagcccgaggactttgcggtgtattactgtcagcactacgggtcgtcctttaatggctccagcctgttcacgttcggacaggggacccgcctggaaatcaag

SEQ ID NO: 1107 - protein, 118 aa, Artificial Sequence
  Description of Artificial Sequence: Synthetic polypeptide
EVQLVESGGGLVQPGGSLRLSCAASGFTFSSYAMSWVRQAPGKGLEWVSAISGSGGSTYYADSVKGRFTISRDNSKNTLYLQMNSLRAEDTAVYYCAKVEGSGSLDYWGQGTLVTVSS

SEQ ID NO: 1108 - protein, 113 aa, Artificial Sequence
  Description of Artificial Sequence: Synthetic polypeptide
EIVMTQSPGTLSLSPGERATLSCRASQSVSSAYLAWYQQKPGQPPRLLISGASTRATGIPDRFGGSGSGTDFTLTISRLEPEDFAVYYCQHYGSSFNGSSLFTFGQGTRLEIK

SEQ ID NO: 1109 - protein, 490 aa, Artificial Sequence
  Description of Artificial Sequence: Synthetic polypeptide
MALPVTALLLPLALLLHAARPEVQLVESGGGLVQPGGSLRLSCAASGFTFSSYAMSWVRQAPGKGLEWVSAISGSGGSTYYADSVKGRFTISRDNSKNTLYLQMNSLRAEDTAVYYCAKVEGSGSLDYWGQGTLVTVSSGGGGSGGGGSGGGGSEIVMTQSPGTLSLSPGERATLSCRASQSVSSAYLAWYQQKPGQPPRLLISGASTRATGIPDRFGGSGSGTDFTLTISRLEPEDFAVYYCQHYGSSFNGSSLFTFGQGTRLEIKTTTPAPRPPTPAPTIASQPLSLRPEACRPAAGGAVHTRGLDFACDIYIWAPLAGTCGVLLLSLVITLYCKRGRKKLLYIFKQPFMRPVQTTQEEDGCSCRFPEEEEGGCELRVKFSRSADAPAYKQGQNQLYNELNLGRREEYDVLDKRRGRDPEMGGKPRRKNPQEGLYNELQKDKMAEAYSEIGMKGERRRGKGHDGLYQGLSTATKDTYDALHMQALPPR

SEQ ID NO: 1110 - DNA, 1470 bp, Artificial Sequence
  Description of Artificial Sequence: Synthetic polynucleotide
atggccctccctgtcaccgccctgctgcttccgctggctcttctgctccacgccgctcggcccgaagtgcagctcgtggagtcaggaggcggcctggtccagccgggagggtcccttagactgtcatgcgccgcaagcggattcactttctcctcctatgccatgagctgggtccgccaagcccccggaaagggactggaatgggtgtccgccatctcggggtctggaggctcaacttactacgctgactccgtgaagggacggttcaccattagccgcgacaactccaagaacaccctctacctccaaatgaactccctgcgggccgaggataccgccgtctactactgcgccaaagtggaaggttcaggatcgctggactactggggacagggtactctcgtgaccgtgtcatcgggcggaggaggttccggcggtggcggctccggcggcggagggtcggagatcgtgatgacccagagccctggtactctgagcctttcgccgggagaaagggccaccctgtcctgccgcgcttcccaatccgtgtcctccgcgtacttggcgtggtaccagcagaagccgggacagccccctcggctgctgatcagcggggccagcacccgggcaaccggaatcccagacagattcgggggttccggcagcggcacagatttcaccctgactatttcgaggttggagcccgaggactttgcggtgtattactgtcagcactacgggtcgtcctttaatggctccagcctgttcacgttcggacaggggacccgcctggaaatcaagaccactaccccagcaccgaggccacccaccccggctcctaccatcgcctcccagcctctgtccctgcgtccggaggcatgtagacccgcagctggtggggccgtgcatacccggggtcttgacttcgcctgcgatatctacatttgggcccctctggctggtacttgcggggtcctgctgctttcactcgtgatcactctttactgtaagcgcggtcggaagaagctgctgtacatctttaagcaacccttcatgaggcctgtgcagactactcaagaggaggacggctgttcatgccggttcccagaggaggaggaaggcggctgcgaactgcgcgtgaaattcagccgcagcgcagatgctccagcctacaagcaggggcagaaccagctctacaacgaactcaatcttggtcggagagaggagtacgacgtgctggacaagcggagaggacgggacccagaaatgggcgggaagccgcgcagaaagaatccccaagagggcctgtacaacgagctccaaaaggataagatggcagaagcctatagcgagattggtatgaaaggggaacgcagaagaggcaaaggccacgacggactgtaccagggactcagcaccgccaccaaggacacctatgacgctcttcacatgcaggccctgccgcctcgg

SEQ ID NO: 1111 - protein, 241 aa, Artificial Sequence
  Description of Artificial Sequence: Synthetic polypeptide
EVQLVETGGGLVQPGGSLRLSCAASGITFSRYPMSWVRQAPGKGLEWVSGISDSGVSTYYADSAKGRFTISRDNSKNTLFLQMSSLRDEDTAVYYCVTRAGSEASDIWGQGTMVTVSSGGGGSGGGGSGGGGSEIVLTQSPATLSLSPGERATLSCRASQSVSNSLAWYQQKPGQAPRLLIYDASSRATGIPDRFSGSGSGTDFTLTISRLEPEDFAIYYCQQFGTSSGLTFGGGTKLEIK

SEQ ID NO: 1112 - DNA, 723 bp, Artificial Sequence
  Description of Artificial Sequence: Synthetic polynucleotide
gaagtgcaactggtggaaaccggtggcggcctggtgcagcctggaggatcattgaggctgtcatgcgcggccagcggtattaccttctcccggtaccccatgtcctgggtcagacaggccccggggaaagggcttgaatgggtgtccgggatctcggactccggtgtcagcacttactacgccgactccgccaagggacgcttcaccatttcccgggacaactcgaagaacaccctgttcctccaaatgagctccctccgggacgaggatactgcagtgtactactgcgtgacccgcgccgggtccgaggcgtctgacatttggggacagggcactatggtcaccgtgtcgtccggcggagggggctcgggaggcggtggcagcggaggaggagggtccgagatcgtgctgacccaatccccggccaccctctcgctgagccctggagaaagggcaaccttgtcctgtcgcgcgagccagtccgtgagcaactccctggcctggtaccagcagaagcccggacaggctccgagacttctgatctacgacgcttcgagccgggccactggaatccccgaccgcttttcggggtccggctcaggaaccgatttcaccctgacaatctcacggctggagccagaggatttcgccatctattactgccagcagttcggtacttcctccggcctgactttcggaggcggcacgaagctcgaaatcaag

SEQ ID NO: 1113 - protein, 118 aa, Artificial Sequence
  Description of Artificial Sequence: Synthetic polypeptide
EVQLVETGGGLVQPGGSLRLSCAASGITFSRYPMSWVRQAPGKGLEWVSGISDSGVSTYYADSAKGRFTISRDNSKNTLFLQMSSLRDEDTAVYYCVTRAGSEASDIWGQGTMVTVSS

SEQ ID NO: 1114 - protein, 108 aa, Artificial Sequence
  Description of Artificial Sequence: Synthetic polypeptide
EIVLTQSPATLSLSPGERATLSCRASQSVSNSLAWYQQKPGQAPRLLIYDASSRATGIPDRFSGSGSGTDFTLTISRLEPEDFAIYYCQQFGTSSGLTFGGGTKLEIK

SEQ ID NO: 1115 - protein, 485 aa, Artificial Sequence
  Description of Artificial Sequence: Synthetic polypeptide
MALPVTALLLPLALLLHAARPEVQLVETGGGLVQPGGSLRLSCAASGITFSRYPMSWVRQAPGKGLEWVSGISDSGVSTYYADSAKGRFTISRDNSKNTLFLQMSSLRDEDTAVYYCVTRAGSEASDIWGQGTMVTVSSGGGGSGGGGSGGGGSEIVLTQSPATLSLSPGERATLSCRASQSVSNSLAWYQQKPGQAPRLLIYDASSRATGIPDRFSGSGSGTDFTLTISRLEPEDFAIYYCQQFGTSSGLTFGGGTKLEIKTTTPAPRPPTPAPTIASQPLSLRPEACRPAAGGAVHTRGLDFACDIYIWAPLAGTCGVLLLSLVITLYCKRGRKKLLYIFKQPFMRPVQTTQEEDGCSCRFPEEEEGGCELRVKFSRSADAPAYKQGQNQLYNELNLGRREEYDVLDKRRGRDPEMGGKPRRKNPQEGLYNELQKDKMAEAYSEIGMKGERRRGKGHDGLYQGLSTATKDTYDALHMQALPPR

SEQ ID NO: 1116 - DNA, 1455 bp, Artificial Sequence
  Description of Artificial Sequence: Synthetic polynucleotide
atggccctccctgtcaccgccctgctgcttccgctggctcttctgctccacgccgctcggcccgaagtgcaactggtggaaaccggtggcggcctggtgcagcctggaggatcattgaggctgtcatgcgcggccagcggtattaccttctcccggtaccccatgtcctgggtcagacaggccccggggaaagggcttgaatgggtgtccgggatctcggactccggtgtcagcacttactacgccgactccgccaagggacgcttcaccatttcccgggacaactcgaagaacaccctgttcctccaaatgagctccctccgggacgaggatactgcagtgtactactgcgtgacccgcgccgggtccgaggcgtctgacatttggggacagggcactatggtcaccgtgtcgtccggcggagggggctcgggaggcggtggcagcggaggaggagggtccgagatcgtgctgacccaatccccggccaccctctcgctgagccctggagaaagggcaaccttgtcctgtcgcgcgagccagtccgtgagcaactccctggcctggtaccagcagaagcccggacaggctccgagacttctgatctacgacgcttcgagccgggccactggaatccccgaccgcttttcggggtccggctcaggaaccgatttcaccctgacaatctcacggctggagccagaggatttcgccatctattactgccagcagttcggtacttcctccggcctgactttcggaggcggcacgaagctcgaaatcaagaccactaccccagcaccgaggccacccaccccggctcctaccatcgcctcccagcctctgtccctgcgtccggaggcatgtagacccgcagctggtggggccgtgcatacccggggtcttgacttcgcctgcgatatctacatttgggcccctctggctggtacttgcggggtcctgctgctttcactcgtgatcactctttactgtaagcgcggtcggaagaagctgctgtacatctttaagcaacccttcatgaggcctgtgcagactactcaagaggaggacggctgttcatgccggttcccagaggaggaggaaggcggctgcgaactgcgcgtgaaattcagccgcagcgcagatgctccagcctacaagcaggggcagaaccagctctacaacgaactcaatcttggtcggagagaggagtacgacgtgctggacaagcggagaggacgggacccagaaatgggcgggaagccgcgcagaaagaatccccaagagggcctgtacaacgagctccaaaaggataagatggcagaagcctatagcgagattggtatgaaaggggaacgcagaagaggcaaaggccacgacggactgtaccagggactcagcaccgccaccaaggacacctatgacgctcttcacatgcaggccctgccgcctcgg

SEQ ID NO: 1117 - protein, 248 aa, Artificial Sequence
  Description of Artificial Sequence: Synthetic polypeptide
QVQLVESGGGLVQPGGSLRLSCAASGFTFSSYAMSWVRQAPGKGLEWVSAISGSGGSTYYADSVKGRFTISRDNAKNSLYLQMNSLRAEDTAIYYCARATYKRELRYYYGMDVWGQGTMVTVSSGGGGSGGGGSGGGGSEIVMTQSPGTVSLSPGERATLSCRASQSVSSSFLAWYQQKPGQAPRLLIYGASSRATGIPDRFSGSGSGTDFTLTISRLEPEDSAVYYCQQYHSSPSWTFGQGTRLEIK

SEQ ID NO: 1118 - DNA, 744 bp, Artificial Sequence
  Description of Artificial Sequence: Synthetic polynucleotide
caagtgcagctcgtggaatcgggtggcggactggtgcagccggggggctcacttagactgtcctgcgcggccagcggattcactttctcctcctacgccatgtcctgggtcagacaggcccctggaaagggcctggaatgggtgtccgcaatcagcggcagcggcggctcgacctattacgcggattcagtgaagggcagattcaccatttcccgggacaacgccaagaactccttgtaccttcaaatgaactccctccgcgcggaagataccgcaatctactactgcgctcgggccacttacaagagggaactgcgctactactacgggatggacgtctggggccagggaaccatggtcaccgtgtccagcggaggaggaggatcgggaggaggcggtagcgggggtggagggtcggagatcgtgatgacccagtcccccggcactgtgtcgctgtcccccggcgaacgggccaccctgtcatgtcgggccagccagtcagtgtcgtcaagcttcctcgcctggtaccagcagaaaccgggacaagctccccgcctgctgatctacggagccagcagccgggccaccggtattcctgaccggttctccggttcggggtccgggaccgactttactctgactatctctcgcctcgagccagaggactccgccgtgtattactgccagcagtaccactcctccccgtcctggacgttcggacagggcacaaggctggagattaag

SEQ ID NO: 1119 - protein, 124 aa, Artificial Sequence
  Description of Artificial Sequence: Synthetic polypeptide
QVQLVESGGGLVQPGGSLRLSCAASGFTFSSYAMSWVRQAPGKGLEWVSAISGSGGSTYYADSVKGRFTISRDNAKNSLYLQMNSLRAEDTAIYYCARATYKRELRYYYGMDVWGQGTMVTVSS

SEQ ID NO: 1120 - protein, 109 aa, Artificial Sequence
  Description of Artificial Sequence: Synthetic polypeptide
EIVMTQSPGTVSLSPGERATLSCRASQSVSSSFLAWYQQKPGQAPRLLIYGASSRATGIPDRFSGSGSGTDFTLTISRLEPEDSAVYYCQQYHSSPSWTFGQGTRLEIK

SEQ ID NO: 1121 - protein, 492 aa, Artificial Sequence
  Description of Artificial Sequence: Synthetic polypeptide
MALPVTALLLPLALLLHAARPQVQLVESGGGLVQPGGSLRLSCAASGFTFSSYAMSWVRQAPGKGLEWVSAISGSGGSTYYADSVKGRFTISRDNAKNSLYLQMNSLRAEDTAIYYCARATYKRELRYYYGMDVWGQGTMVTVSSGGGGSGGGGSGGGGSEIVMTQSPGTVSLSPGERATLSCRASQSVSSSFLAWYQQKPGQAPRLLIYGASSRATGIPDRFSGSGSGTDFTLTISRLEPEDSAVYYCQQYHSSPSWTFGQGTRLEIKTTTPAPRPPTPAPTIASQPLSLRPEACRPAAGGAVHTRGLDFACDIYIWAPLAGTCGVLLLSLVITLYCKRGRKKLLYIFKQPFMRPVQTTQEEDGCSCRFPEEEEGGCELRVKFSRSADAPAYKQGQNQLYNELNLGRREEYDVLDKRRGRDPEMGGKPRRKNPQEGLYNELQKDKMAEAYSEIGMKGERRRGKGHDGLYQGLSTATKDTYDALHMQALPPR

SEQ ID NO: 1122 - DNA, 1476 bp, Artificial Sequence
  Description of Artificial Sequence: Synthetic polynucleotide
atggccctccctgtcaccgccctgctgcttccgctggctcttctgctccacgccgctcggccccaagtgcagctcgtggaatcgggtggcggactggtgcagccggggggctcacttagactgtcctgcgcggccagcggattcactttctcctcctacgccatgtcctgggtcagacaggcccctggaaagggcctggaatgggtgtccgcaatcagcggcagcggcggctcgacctattacgcggattcagtgaagggcagattcaccatttcccgggacaacgccaagaactccttgtaccttcaaatgaactccctccgcgcggaagataccgcaatctactactgcgctcgggccacttacaagagggaactgcgctactactacgggatggacgtctggggccagggaaccatggtcaccgtgtccagcggaggaggaggatcgggaggaggcggtagcgggggtggagggtcggagatcgtgatgacccagtcccccggcactgtgtcgctgtcccccggcgaacgggccaccctgtcatgtcgggccagccagtcagtgtcgtcaagcttcctcgcctggtaccagcagaaaccgggacaagctccccgcctgctgatctacggagccagcagccgggccaccggtattcctgaccggttctccggttcggggtccgggaccgactttactctgactatctctcgcctcgagccagaggactccgccgtgtattactgccagcagtaccactcctccccgtcctggacgttcggacagggcacaaggctggagattaagaccactaccccagcaccgaggccacccaccccggctcctaccatcgcctcccagcctctgtccctgcgtccggaggcatgtagacccgcagctggtggggccgtgcatacccggggtcttgacttcgcctgcgatatctacatttgggcccctctggctggtacttgcggggtcctgctgctttcactcgtgatcactctttactgtaagcgcggtcggaagaagctgctgtacatctttaagcaacccttcatgaggcctgtgcagactactcaagaggaggacggctgttcatgccggttcccagaggaggaggaaggcggctgcgaactgcgcgtgaaattcagccgcagcgcagatgctccagcctacaagcaggggcagaaccagctctacaacgaactcaatcttggtcggagagaggagtacgacgtgctggacaagcggagaggacgggacccagaaatgggcgggaagccgcgcagaaagaatccccaagagggcctgtacaacgagctccaaaaggataagatggcagaagcctatagcgagattggtatgaaaggggaacgcagaagaggcaaaggccacgacggactgtaccagggactcagcaccgccaccaaggacacctatgacgctcttcacatgcaggccctgccgcctcgg

SEQ ID NO: 1123 - protein, 248 aa, Artificial Sequence
  Description of Artificial Sequence: Synthetic polypeptide
EVQLVETGGGLVQPGGSLRLSCAASGFTFSSYAMSWVRQAPGKGLEWVSAISGSGGSTYYADSVKGRFTISRDNSKNTLYLQMNTLKAEDTAVYYCARATYKRELRYYYGMDVWGQGTTVTVSSGGGGSGGGGSGGGGSEIVLTQSPSTLSLSPGESATLSCRASQSVSTTFLAWYQQKPGQAPRLLIYGSSNRATGIPDRFSGSGSGTDFTLTIRRLEPEDFAVYYCQQYHSSPSWTFGQGTKVEIK

SEQ ID NO: 1124 - DNA, 744 bp, Artificial Sequence
  Description of Artificial Sequence: Synthetic polynucleotide
gaggtgcagcttgtggaaaccggtggcggactggtgcagcccggaggaagcctcaggctgtcctgcgccgcgtccggcttcaccttctcctcgtacgccatgtcctgggtccgccaggcccccggaaagggcctggaatgggtgtccgccatctctggaagcggaggttccacgtactacgcggacagcgtcaagggaaggttcacaatctcccgcgataattcgaagaacactctgtaccttcaaatgaacaccctgaaggccgaggacactgctgtgtactactgcgcacgggccacctacaagagagagctccggtactactacggaatggacgtctggggccagggaactactgtgaccgtgtcctcgggagggggtggctccggggggggcggctccggcggaggcggttccgagattgtgctgacccagtcaccttcaactctgtcgctgtccccgggagagagcgctactctgagctgccgggccagccagtccgtgtccaccaccttcctcgcctggtatcagcagaagccggggcaggcaccacggctcttgatctacgggtcaagcaacagagcgaccggaattcctgaccgcttctcggggagcggttcaggcaccgacttcaccctgactatccggcgcctggaacccgaagatttcgccgtgtattactgtcaacagtaccactcctcgccgtcctggacctttggccaaggaaccaaagtggaaatcaag

SEQ ID NO: 1125 - protein, 124 aa, Artificial Sequence
  Description of Artificial Sequence: Synthetic polypeptide
EVQLVETGGGLVQPGGSLRLSCAASGFTFSSYAMSWVRQAPGKGLEWVSAISGSGGSTYYADSVKGRFTISRDNSKNTLYLQMNTLKAEDTAVYYCARATYKRELRYYYGMDVWGQGTTVTVSS

SEQ ID NO: 1126 - protein, 109 aa, Artificial Sequence
  Description of Artificial Sequence: Synthetic polypeptide
EIVLTQSPSTLSLSPGESATLSCRASQSVSTTFLAWYQQKPGQAPRLLIYGSSNRATGIPDRFSGSGSGTDFTLTIRRLEPEDFAVYYCQQYHSSPSWTFGQGTKVEIK

SEQ ID NO: 1127 - protein, 492 aa, Artificial Sequence
  Description of Artificial Sequence: Synthetic polypeptide
MALPVTALLLPLALLLHAARPEVQLVETGGGLVQPGGSLRLSCAASGFTFSSYAMSWVRQAPGKGLEWVSAISGSGGSTYYADSVKGRFTISRDNSKNTLYLQMNTLKAEDTAVYYCARATYKRELRYYYGMDVWGQGTTVTVSSGGGGSGGGGSGGGGSEIVLTQSPSTLSLSPGESATLSCRASQSVSTTFLAWYQQKPGQAPRLLIYGSSNRATGIPDRFSGSGSGTDFTLTIRRLEPEDFAVYYCQQYHSSPSWTFGQGTKVEIKTTTPAPRPPTPAPTIASQPLSLRPEACRPAAGGAVHTRGLDFACDIYIWAPLAGTCGVLLLSLVITLYCKRGRKKLLYIFKQPFMRPVQTTQEEDGCSCRFPEEEEGGCELRVKFSRSADAPAYKQGQNQLYNELNLGRREEYDVLDKRRGRDPEMGGKPRRKNPQEGLYNELQKDKMAEAYSEIGMKGERRRGKGHDGLYQGLSTATKDTYDALHMQALPPR

SEQ ID NO: 1128 - DNA, 1476 bp, Artificial Sequence
  Description of Artificial Sequence: Synthetic polynucleotide
atggccctccctgtcaccgccctgctgcttccgctggctcttctgctccacgccgctcggcccgaggtgcagcttgtggaaaccggtggcggactggtgcagcccggaggaagcctcaggctgtcctgcgccgcgtccggcttcaccttctcctcgtacgccatgtcctgggtccgccaggcccccggaaagggcctggaatgggtgtccgccatctctggaagcggaggttccacgtactacgcggacagcgtcaagggaaggttcacaatctcccgcgataattcgaagaacactctgtaccttcaaatgaacaccctgaaggccgaggacactgctgtgtactactgcgcacgggccacctacaagagagagctccggtactactacggaatggacgtctggggccagggaactactgtgaccgtgtcctcgggagggggtggctccggggggggcggctccggcggaggcggttccgagattgtgctgacccagtcaccttcaactctgtcgctgtccccgggagagagcgctactctgagctgccgggccagccagtccgtgtccaccaccttcctcgcctggtatcagcagaagccggggcaggcaccacggctcttgatctacgggtcaagcaacagagcgaccggaattcctgaccgcttctcggggagcggttcaggcaccgacttcaccctgactatccggcgcctggaacccgaagatttcgccgtgtattactgtcaacagtaccactcctcgccgtcctggacctttggccaaggaaccaaagtggaaatcaagaccactaccccagcaccgaggccacccaccccggctcctaccatcgcctcccagcctctgtccctgcgtccggaggcatgtagacccgcagctggtggggccgtgcatacccggggtcttgacttcgcctgcgatatctacatttgggcccctctggctggtacttgcggggtcctgctgctttcactcgtgatcactctttactgtaagcgcggtcggaagaagctgctgtacatctttaagcaacccttcatgaggcctgtgcagactactcaagaggaggacggctgttcatgccggttcccagaggaggaggaaggcggctgcgaactgcgcgtgaaattcagccgcagcgcagatgctccagcctacaagcaggggcagaaccagctctacaacgaactcaatcttggtcggagagaggagtacgacgtgctggacaagcggagaggacgggacccagaaatgggcgggaagccgcgcagaaagaatccccaagagggcctgtacaacgagctccaaaaggataagatggcagaagcctatagcgagattggtatgaaaggggaacgcagaagaggcaaaggccacgacggactgtaccagggactcagcaccgccaccaaggacacctatgacgctcttcacatgcaggccctgccgcctcgg

SEQ ID NO: 1129 - protein, 239 aa, Artificial Sequence
  Description of Artificial Sequence: Synthetic polypeptide
EVQLVETGGGLVQPGRSLRLSCAASGFTFDDYAMHWVRQAPGKGLEWVSGISWNSGSIGYADSVKGRFTISRDNAKNSLYLQMNSLRDEDTAVYYCARVGKAVPDVWGQGTTVTVSSGGGGSGGGGSGGGGSDIVMTQTPSSLSASVGDRVTITCRASQSISSYLNWYQQKPGKAPKLLIYAASSLQSGVPSRFSGSGSGTDFTLTISSLQPEDFATYYCQQSYSTPYSFGQGTRLEIK

SEQ ID NO: 1130 - DNA, 717 bp, Artificial Sequence
  Description of Artificial Sequence: Synthetic polynucleotide
gaagtgcagctcgtggaaactggaggtggactcgtgcagcctggacggtcgctgcggctgagctgcgctgcatccggcttcaccttcgacgattatgccatgcactgggtcagacaggcgccagggaagggacttgagtgggtgtccggtatcagctggaatagcggctcaatcggatacgcggactccgtgaagggaaggttcaccatttcccgcgacaacgccaagaactccctgtacttgcaaatgaacagcctccgggatgaggacactgccgtgtactactgcgcccgcgtcggaaaagctgtgcccgacgtctggggccagggaaccactgtgaccgtgtccagcggcgggggtggatcgggcggtggagggtccggtggagggggctcagatattgtgatgacccagaccccctcgtccctgtccgcctcggtcggcgaccgcgtgactatcacatgtagagcctcgcagagcatctccagctacctgaactggtatcagcagaagccggggaaggccccgaagctcctgatctacgcggcatcatcactgcaatcgggagtgccgagccggttttccgggtccggctccggcaccgacttcacgctgaccatttcttccctgcaacccgaggacttcgccacttactactgccagcagtcctactccaccccttactccttcggccaaggaaccaggctggaaatcaag

SEQ ID NO: 1131 - protein, 117 aa, Artificial Sequence
  Description of Artificial Sequence: Synthetic polypeptide
EVQLVETGGGLVQPGRSLRLSCAASGFTFDDYAMHWVRQAPGKGLEWVSGISWNSGSIGYADSVKGRFTISRDNAKNSLYLQMNSLRDEDTAVYYCARVGKAVPDVWGQGTTVTVSS

SEQ ID NO: 1132 - protein, 107 aa, Artificial Sequence
  Description of Artificial Sequence: Synthetic polypeptide
DIVMTQTPSSLSASVGDRVTITCRASQSISSYLNWYQQKPGKAPKLLIYAASSLQSGVPSRFSGSGSGTDFTLTISSLQPEDFATYYCQQSYSTPYSFGQGTRLEIK

SEQ ID NO: 1133 - protein, 483 aa, Artificial Sequence
  Description of Artificial Sequence: Synthetic polypeptide
MALPVTALLLPLALLLHAARPEVQLVETGGGLVQPGRSLRLSCAASGFTFDDYAMHWVRQAPGKGLEWVSGISWNSGSIGYADSVKGRFTISRDNAKNSLYLQMNSLRDEDTAVYYCARVGKAVPDVWGQGTTVTVSSGGGGSGGGGSGGGGSDIVMTQTPSSLSASVGDRVTITCRASQSISSYLNWYQQKPGKAPKLLIYAASSLQSGVPSRFSGSGSGTDFTLTISSLQPEDFATYYCQQSYSTPYSFGQGTRLEIKTTTPAPRPPTPAPTIASQPLSLRPEACRPAAGGAVHTRGLDFACDIYIWAPLAGTCGVLLLSLVITLYCKRGRKKLLYIFKQPFMRPVQTTQEEDGCSCRFPEEEEGGCELRVKFSRSADAPAYKQGQNQLYNELNLGRREEYDVLDKRRGRDPEMGGKPRRKNPQEGLYNELQKDKMAEAYSEIGMKGERRRGKGHDGLYQGLSTATKDTYDALHMQALPPR

SEQ ID NO: 1134 - DNA, 1449 bp, Artificial Sequence
  Description of Artificial Sequence: Synthetic polynucleotide
atggccctccctgtcaccgccctgctgcttccgctggctcttctgctccacgccgctcggcccgaagtgcagctcgtggaaactggaggtggactcgtgcagcctggacggtcgctgcggctgagctgcgctgcatccggcttcaccttcgacgattatgccatgcactgggtcagacaggcgccagggaagggacttgagtgggtgtccggtatcagctggaatagcggctcaatcggatacgcggactccgtgaagggaaggttcaccatttcccgcgacaacgccaagaactccctgtacttgcaaatgaacagcctccgggatgaggacactgccgtgtactactgcgcccgcgtcggaaaagctgtgcccgacgtctggggccagggaaccactgtgaccgtgtccagcggcgggggtggatcgggcggtggagggtccggtggagggggctcagatattgtgatgacccagaccccctcgtccctgtccgcctcggtcggcgaccgcgtgactatcacatgtagagcctcgcagagcatctccagctacctgaactggtatcagcagaagccggggaaggccccgaagctcctgatctacgcggcatcatcactgcaatcgggagtgccgagccggttttccgggtccggctccggcaccgacttcacgctgaccatttcttccctgcaacccgaggacttcgccacttactactgccagcagtcctactccaccccttactccttcggccaaggaaccaggctggaaatcaagaccactaccccagcaccgaggccacccaccccggctcctaccatcgcctcccagcctctgtccctgcgtccggaggcatgtagacccgcagctggtggggccgtgcatacccggggtcttgacttcgcctgcgatatctacatttgggcccctctggctggtacttgcggggtcctgctgctttcactcgtgatcactctttactgtaagcgcggtcggaagaagctgctgtacatctttaagcaacccttcatgaggcctgtgcagactactcaagaggaggacggctgttcatgccggttcccagaggaggaggaaggcggctgcgaactgcgcgtgaaattcagccgcagcgcagatgctccagcctacaagcaggggcagaaccagctctacaacgaactcaatcttggtcggagagaggagtacgacgtgctggacaagcggagaggacgggacccagaaatgggcgggaagccgcgcagaaagaatccccaagagggcctgtacaacgagctccaaaaggataagatggcagaagcctatagcgagattggtatgaaaggggaacgcagaagaggcaaaggccacgacggactgtaccagggactcagcaccgccaccaaggacacctatgacgctcttcacatgcaggccctgccgcctcgg

SEQ ID NO: 1135 - protein, 246 aa, Artificial Sequence
  Description of Artificial Sequence: Synthetic polypeptide
EVQLVESGGGLVQPGRSLRLSCTASGFTFDDYAMHWVRQRPGKGLEWVASINWKGNSLAYGDSVKGRFAISRDNAKNTVFLQMNSLRTEDTAVYYCASHQGVAYYNYAMDVWGRGTLVTVSSGGGGSGGGGSGGGGSEIVLTQSPGTLSLSPGERATLSCRATQSIGSSFLAWYQQRPGQAPRLLIYGASQRATGIPDRFSGRGSGTDFTLTISRVEPEDSAVYYCQHYESSPSWTFGQGTKVEIK

SEQ ID NO: 1136 - DNA, 738 bp, Artificial Sequence
  Description of Artificial Sequence: Synthetic polynucleotide
gaagtgcagctcgtggagagcgggggaggattggtgcagcccggaaggtccctgcggctctcctgcactgcgtctggcttcaccttcgacgactacgcgatgcactgggtcagacagcgcccgggaaagggcctggaatgggtcgcctcaatcaactggaagggaaactccctggcctatggcgacagcgtgaagggccgcttcgccatttcgcgcgacaacgccaagaacaccgtgtttctgcaaatgaattccctgcggaccgaggataccgctgtgtactactgcgccagccaccagggcgtggcatactataactacgccatggacgtgtggggaagagggacgctcgtcaccgtgtcctccgggggcggtggatcgggtggaggaggaagcggtggcgggggcagcgaaatcgtgctgactcagagcccgggaactctttcactgtccccgggagaacgggccactctctcgtgccgggccacccagtccatcggctcctccttccttgcctggtaccagcagaggccaggacaggcgccccgcctgctgatctacggtgcttcccaacgcgccactggcattcctgaccggttcagcggcagagggtcgggaaccgatttcacactgaccatttcccgggtggagcccgaagattcggcagtctactactgtcagcattacgagtcctccccttcatggaccttcggtcaagggaccaaagtggagatcaag

SEQ ID NO: 1137 - protein, 122 aa, Artificial Sequence
  Description of Artificial Sequence: Synthetic polypeptide
EVQLVESGGGLVQPGRSLRLSCTASGFTFDDYAMHWVRQRPGKGLEWVASINWKGNSLAYGDSVKGRFAISRDNAKNTVFLQMNSLRTEDTAVYYCASHQGVAYYNYAMDVWGRGTLVTVSS

SEQ ID NO: 1138 - protein, 109 aa, Artificial Sequence
  Description of Artificial Sequence: Synthetic polypeptide
EIVLTQSPGTLSLSPGERATLSCRATQSIGSSFLAWYQQRPGQAPRLLIYGASQRATGIPDRFSGRGSGTDFTLTISRVEPEDSAVYYCQHYESSPSWTFGQGTKVEIK

SEQ ID NO: 1139 - protein, 490 aa, Artificial Sequence
  Description of Artificial Sequence: Synthetic polypeptide
MALPVTALLLPLALLLHAARPEVQLVESGGGLVQPGRSLRLSCTASGFTFDDYAMHWVRQRPGKGLEWVASINWKGNSLAYGDSVKGRFAISRDNAKNTVFLQMNSLRTEDTAVYYCASHQGVAYYNYAMDVWGRGTLVTVSSGGGGSGGGGSGGGGSEIVLTQSPGTLSLSPGERATLSCRATQSIGSSFLAWYQQRPGQAPRLLIYGASQRATGIPDRFSGRGSGTDFTLTISRVEPEDSAVYYCQHYESSPSWTFGQGTKVEIKTTTPAPRPPTPAPTIASQPLSLRPEACRPAAGGAVHTRGLDFACDIYIWAPLAGTCGVLLLSLVITLYCKRGRKKLLYIFKQPFMRPVQTTQEEDGCSCRFPEEEEGGCELRVKFSRSADAPAYKQGQNQLYNELNLGRREEYDVLDKRRGRDPEMGGKPRRKNPQEGLYNELQKDKMAEAYSEIGMKGERRRGKGHDGLYQGLSTATKDTYDALHMQALPPR

SEQ ID NO: 1140 - DNA, 1470 bp, Artificial Sequence
  Description of Artificial Sequence: Synthetic polynucleotide
atggccctccctgtcaccgccctgctgcttccgctggctcttctgctccacgccgctcggcccgaagtgcagctcgtggagagcgggggaggattggtgcagcccggaaggtccctgcggctctcctgcactgcgtctggcttcaccttcgacgactacgcgatgcactgggtcagacagcgcccgggaaagggcctggaatgggtcgcctcaatcaactggaagggaaactccctggcctatggcgacagcgtgaagggccgcttcgccatttcgcgcgacaacgccaagaacaccgtgtttctgcaaatgaattccctgcggaccgaggataccgctgtgtactactgcgccagccaccagggcgtggcatactataactacgccatggacgtgtggggaagagggacgctcgtcaccgtgtcctccgggggcggtggatcgggtggaggaggaagcggtggcgggggcagcgaaatcgtgctgactcagagcccgggaactctttcactgtccccgggagaacgggccactctctcgtgccgggccacccagtccatcggctcctccttccttgcctggtaccagcagaggccaggacaggcgccccgcctgctgatctacggtgcttcccaacgcgccactggcattcctgaccggttcagcggcagagggtcgggaaccgatttcacactgaccatttcccgggtggagcccgaagattcggcagtctactactgtcagcattacgagtcctccccttcatggaccttcggtcaagggaccaaagtggagatcaagaccactaccccagcaccgaggccacccaccccggctcctaccatcgcctcccagcctctgtccctgcgtccggaggcatgtagacccgcagctggtggggccgtgcatacccggggtcttgacttcgcctgcgatatctacatttgggcccctctggctggtacttgcggggtcctgctgctttcactcgtgatcactctttactgtaagcgcggtcggaagaagctgctgtacatctttaagcaacccttcatgaggcctgtgcagactactcaagaggaggacggctgttcatgccggttcccagaggaggaggaaggcggctgcgaactgcgcgtgaaattcagccgcagcgcagatgctccagcctacaagcaggggcagaaccagctctacaacgaactcaatcttggtcggagagaggagtacgacgtgctggacaagcggagaggacgggacccagaaatgggcgggaagccgcgcagaaagaatccccaagagggcctgtacaacgagctccaaaaggataagatggcagaagcctatagcgagattggtatgaaaggggaacgcagaagaggcaaaggccacgacggactgtaccagggactcagcaccgccaccaaggacacctatgacgctcttcacatgcaggccctgccgcctcgg

SEQ ID NO: 1141 - protein, 241 aa, Artificial Sequence
  Description of Artificial Sequence: Synthetic polypeptide
EVQLVESGGGLVQPGGSLRLSCAASGFTFSSYAMSWVRQAPGKGLEWVSAISGSGGSTYYADSVKGRFTISRDNSKNTLYLQMNSLRAEDTAVYYCAKVVRDGMDVWGQGTTVTVSSGGGGSGGGGSGGGGSEIVLTQSPATLSLSPGERATLSCRASQSVSSSYLAWYQQKPGQAPRLLIYGASSRATGIPDRFSGNGSGTDFTLTISRLEPEDFAVYYCQQYGSPPRFTFGPGTKVDIK

SEQ ID NO: 1142 - DNA, 723 bp, Artificial Sequence
  Description of Artificial Sequence: Synthetic polynucleotide
gaggtgcagttggtcgaaagcgggggcgggcttgtgcagcctggcggatcactgcggctgtcctgcgcggcatcaggcttcacgttttcttcctacgccatgtcctgggtgcgccaggcccctggaaagggactggaatgggtgtccgcgatttcggggtccggcgggagcacctactacgccgattccgtgaagggccgcttcactatctcgcgggacaactccaagaacaccctctacctccaaatgaatagcctgcgggccgaggataccgccgtctactattgcgctaaggtcgtgcgcgacggaatggacgtgtggggacagggtaccaccgtgacagtgtcctcggggggaggcggtagcggcggaggaggaagcggtggtggaggttccgagattgtgctgactcaatcacccgcgaccctgagcctgtcccccggcgaaagggccactctgtcctgtcgggccagccaatcagtctcctcctcgtacctggcctggtaccagcagaagccaggacaggctccgagactccttatctatggcgcatcctcccgcgccaccggaatcccggataggttctcgggaaacggatcggggaccgacttcactctcaccatctcccggctggaaccggaggacttcgccgtgtactactgccagcagtacggcagcccgcctagattcactttcggccccggcaccaaagtggacatcaag

SEQ ID NO: 1143 - protein, 117 aa, Artificial Sequence
  Description of Artificial Sequence: Synthetic polypeptide
EVQLVESGGGLVQPGGSLRLSCAASGFTFSSYAMSWVRQAPGKGLEWVSAISGSGGSTYYADSVKGRFTISRDNSKNTLYLQMNSLRAEDTAVYYCAKVVRDGMDVWGQGTTVTVSS

SEQ ID NO: 1144 - protein, 109 aa, Artificial Sequence
  Description of Artificial Sequence: Synthetic polypeptide
EIVLTQSPATLSLSPGERATLSCRASQSVSSSYLAWYQQKPGQAPRLLIYGASSRATGIPDRFSGNGSGTDFTLTISRLEPEDFAVYYCQQYGSPPRFTFGPGTKVDIK

SEQ ID NO: 1145 - protein, 485 aa, Artificial Sequence
  Description of Artificial Sequence: Synthetic polypeptide
MALPVTALLLPLALLLHAARPEVQLVESGGGLVQPGGSLRLSCAASGFTFSSYAMSWVRQAPGKGLEWVSAISGSGGSTYYADSVKGRFTISRDNSKNTLYLQMNSLRAEDTAVYYCAKVVRDGMDVWGQGTTVTVSSGGGGSGGGGSGGGGSEIVLTQSPATLSLSPGERATLSCRASQSVSSSYLAWYQQKPGQAPRLLIYGASSRATGIPDRFSGNGSGTDFTLTISRLEPEDFAVYYCQQYGSPPRFTFGPGTKVDIKTTTPAPRPPTPAPTIASQPLSLRPEACRPAAGGAVHTRGLDFACDIYIWAPLAGTCGVLLLSLVITLYCKRGRKKLLYIFKQPFMRPVQTTQEEDGCSCRFPEEEEGGCELRVKFSRSADAPAYKQGQNQLYNELNLGRREEYDVLDKRRGRDPEMGGKPRRKNPQEGLYNELQKDKMAEAYSEIGMKGERRRGKGHDGLYQGLSTATKDTYDALHMQALPPR

SEQ ID NO: 1146 - DNA, 1455 bp, Artificial Sequence
  Description of Artificial Sequence: Synthetic polynucleotide
atggccctccctgtcaccgccctgctgcttccgctggctcttctgctccacgccgctcggcccgaggtgcagttggtcgaaagcgggggcgggcttgtgcagcctggcggatcactgcggctgtcctgcgcggcatcaggcttcacgttttcttcctacgccatgtcctgggtgcgccaggcccctggaaagggactggaatgggtgtccgcgatttcggggtccggcgggagcacctactacgccgattccgtgaagggccgcttcactatctcgcgggacaactccaagaacaccctctacctccaaatgaatagcctgcgggccgaggataccgccgtctactattgcgctaaggtcgtgcgcgacggaatggacgtgtggggacagggtaccaccgtgacagtgtcctcggggggaggcggtagcggcggaggaggaagcggtggtggaggttccgagattgtgctgactcaatcacccgcgaccctgagcctgtcccccggcgaaagggccactctgtcctgtcgggccagccaatcagtctcctcctcgtacctggcctggtaccagcagaagccaggacaggctccgagactccttatctatggcgcatcctcccgcgccaccggaatcccggataggttctcgggaaacggatcggggaccgacttcactctcaccatctcccggctggaaccggaggacttcgccgtgtactactgccagcagtacggcagcccgcctagattcactttcggccccggcaccaaagtggacatcaagaccactaccccagcaccgaggccacccaccccggctcctaccatcgcctcccagcctctgtccctgcgtccggaggcatgtagacccgcagctggtggggccgtgcatacccggggtcttgacttcgcctgcgatatctacatttgggcccctctggctggtacttgcggggtcctgctgctttcactcgtgatcactctttactgtaagcgcggtcggaagaagctgctgtacatctttaagcaacccttcatgaggcctgtgcagactactcaagaggaggacggctgttcatgccggttcccagaggaggaggaaggcggctgcgaactgcgcgtgaaattcagccgcagcgcagatgctccagcctacaagcaggggcagaaccagctctacaacgaactcaatcttggtcggagagaggagtacgacgtgctggacaagcggagaggacgggacccagaaatgggcgggaagccgcgcagaaagaatccccaagagggcctgtacaacgagctccaaaaggataagatggcagaagcctatagcgagattggtatgaaaggggaacgcagaagaggcaaaggccacgacggactgtaccagggactcagcaccgccaccaaggacacctatgacgctcttcacatgcaggccctgccgcctcgg

SEQ ID NO: 1147 - protein, 242 aa, Artificial Sequence
  Description of Artificial Sequence: Synthetic polypeptide
EVQLLESGGGLVQPGGSLRLSCAASGFTFSSYAMSWVRQAPGKGLEWVSAISGSGGSTYYADSVKGRFTISRDNSKNTLYLQMNSLRAEDTAVYYCAKIPQTGTFDYWGQGTLVTVSSGGGGSGGGGSGGGGSEIVLTQSPGTLSLSPGERATLSCRASQSVSSSYLAWYQQRPGQAPRLLIYGASSRATGIPDRFSGSGSGTDFTLTISRLEPEDFAVYYCQHYGSSPSWTFGQGTRLEIK

SEQ ID NO: 1148 - DNA, 726 bp, Artificial Sequence
  Description of Artificial Sequence: Synthetic polynucleotide
gaagtgcagctgctggagtccggcggtggattggtgcaaccggggggatcgctcagactgtcctgtgcggcgtcaggcttcaccttctcgagctacgccatgtcatgggtcagacaggcccctggaaagggtctggaatgggtgtccgccatttccgggagcgggggatctacatactacgccgatagcgtgaagggccgcttcaccatttcccgggacaactccaagaacactctctatctgcaaatgaactccctccgcgctgaggacactgccgtgtactactgcgccaaaatccctcagaccggcaccttcgactactggggacaggggactctggtcaccgtcagcagcggtggcggaggttcggggggaggaggaagcggcggcggagggtccgagattgtgctgacccagtcacccggcactttgtccctgtcgcctggagaaagggccaccctttcctgccgggcatcccaatccgtgtcctcctcgtacctggcctggtaccagcagaggcccggacaggccccacggcttctgatctacggagcaagcagccgcgcgaccggtatcccggaccggttttcgggctcgggctcaggaactgacttcaccctcaccatctcccgcctggaacccgaagatttcgctgtgtattactgccagcactacggcagctccccgtcctggacgttcggccagggaactcggctggagatcaag

SEQ ID NO: 1149 - protein, 118 aa, Artificial Sequence
  Description of Artificial Sequence: Synthetic polypeptide
EVQLLESGGGLVQPGGSLRLSCAASGFTFSSYAMSWVRQAPGKGLEWVSAISGSGGSTYYADSVKGRFTISRDNSKNTLYLQMNSLRAEDTAVYYCAKIPQTGTFDYWGQGTLVTVSS

SEQ ID NO: 1150 - protein, 109 aa, Artificial Sequence
  Description of Artificial Sequence: Synthetic polypeptide
EIVLTQSPGTLSLSPGERATLSCRASQSVSSSYLAWYQQRPGQAPRLLIYGASSRATGIPDRFSGSGSGTDFTLTISRLEPEDFAVYYCQHYGSSPSWTFGQGTRLEIK

SEQ ID NO: 1151 - protein, 486 aa, Artificial Sequence
  Description of Artificial Sequence: Synthetic polypeptide
MALPVTALLLPLALLLHAARPEVQLLESGGGLVQPGGSLRLSCAASGFTFSSYAMSWVRQAPGKGLEWVSAISGSGGSTYYADSVKGRFTISRDNSKNTLYLQMNSLRAEDTAVYYCAKIPQTGTFDYWGQGTLVTVSSGGGGSGGGGSGGGGSEIVLTQSPGTLSLSPGERATLSCRASQSVSSSYLAWYQQRPGQAPRLLIYGASSRATGIPDRFSGSGSGTDFTLTISRLEPEDFAVYYCQHYGSSPSWTFGQGTRLEIKTTTPAPRPPTPAPTIASQPLSLRPEACRPAAGGAVHTRGLDFACDIYIWAPLAGTCGVLLLSLVITLYCKRGRKKLLYIFKQPFMRPVQTTQEEDGCSCRFPEEEEGGCELRVKFSRSADAPAYKQGQNQLYNELNLGRREEYDVLDKRRGRDPEMGGKPRRKNPQEGLYNELQKDKMAEAYSEIGMKGERRRGKGHDGLYQGLSTATKDTYDALHMQALPPR

SEQ ID NO: 1152 - DNA, 1458 bp, Artificial Sequence
  Description of Artificial Sequence: Synthetic polynucleotide
atggccctccctgtcaccgccctgctgcttccgctggctcttctgctccacgccgctcggcccgaagtgcagctgctggagtccggcggtggattggtgcaaccggggggatcgctcagactgtcctgtgcggcgtcaggcttcaccttctcgagctacgccatgtcatgggtcagacaggcccctggaaagggtctggaatgggtgtccgccatttccgggagcgggggatctacatactacgccgatagcgtgaagggccgcttcaccatttcccgggacaactccaagaacactctctatctgcaaatgaactccctccgcgctgaggacactgccgtgtactactgcgccaaaatccctcagaccggcaccttcgactactggggacaggggactctggtcaccgtcagcagcggtggcggaggttcggggggaggaggaagcggcggcggagggtccgagattgtgctgacccagtcacccggcactttgtccctgtcgcctggagaaagggccaccctttcctgccgggcatcccaatccgtgtcctcctcgtacctggcctggtaccagcagaggcccggacaggccccacggcttctgatctacggagcaagcagccgcgcgaccggtatcccggaccggttttcgggctcgggctcaggaactgacttcaccctcaccatctcccgcctggaacccgaagatttcgctgtgtattactgccagcactacggcagctccccgtcctggacgttcggccagggaactcggctggagatcaagaccactaccccagcaccgaggccacccaccccggctcctaccatcgcctcccagcctctgtccctgcgtccggaggcatgtagacccgcagctggtggggccgtgcatacccggggtcttgacttcgcctgcgatatctacatttgggcccctctggctggtacttgcggggtcctgctgctttcactcgtgatcactctttactgtaagcgcggtcggaagaagctgctgtacatctttaagcaacccttcatgaggcctgtgcagactactcaagaggaggacggctgttcatgccggttcccagaggaggaggaaggcggctgcgaactgcgcgtgaaattcagccgcagcgcagatgctccagcctacaagcaggggcagaaccagctctacaacgaactcaatcttggtcggagagaggagtacgacgtgctggacaagcggagaggacgggacccagaaatgggcgggaagccgcgcagaaagaatccccaagagggcctgtacaacgagctccaaaaggataagatggcagaagcctatagcgagattggtatgaaaggggaacgcagaagaggcaaaggccacgacggactgtaccagggactcagcaccgccaccaaggacacctatgacgctcttcacatgcaggccctgccgcctcgg

SEQ ID NO: 1153 - protein, 248 aa, Artificial Sequence
  Description of Artificial Sequence: Synthetic polypeptide
EVQLVETGGGLVQPGGSLRLSCAASGFTFSSYAMSWVRQAPGKGLEWVSAISGSGGSTYYADSVKGRFTMSRENDKNSVFLQMNSLRVEDTGVYYCARANYKRELRYYYGMDVWGQGTMVTVSSGGGGSGGGGSGGGGSEIVMTQSPGTLSLSPGESATLSCRASQRVASNYLAWYQHKPGQAPSLLISGASSRATGVPDRFSGSGSGTDFTLAISRLEPEDSAVYYCQHYDSSPSWTFGQGTKVEIK

SEQ ID NO: 1154 - DNA, 744 bp, Artificial Sequence
  Description of Artificial Sequence: Synthetic polynucleotide
gaagtgcaactggtggaaaccggtggaggactcgtgcagcctggcggcagcctccggctgagctgcgccgcttcgggattcaccttttcctcctacgcgatgtcttgggtcagacaggcccccggaaaggggctggaatgggtgtcagccatctccggctccggcggatcaacgtactacgccgactccgtgaaaggccggttcaccatgtcgcgcgagaatgacaagaactccgtgttcctgcaaatgaactccctgagggtggaggacaccggagtgtactattgtgcgcgcgccaactacaagagagagctgcggtactactacggaatggacgtctggggacagggaactatggtgaccgtgtcatccggtggagggggaagcggcggtggaggcagcgggggcgggggttcagaaattgtcatgacccagtccccgggaactctttccctctcccccggggaatccgcgactttgtcctgccgggccagccagcgcgtggcctcgaactacctcgcatggtaccagcataagccaggccaagccccttccctgctgatttccggggctagcagccgcgccactggcgtgccggataggttctcgggaagcggctcgggtaccgatttcaccctggcaatctcgcggctggaaccggaggattcggccgtgtactactgccagcactatgactcatccccctcctggacattcggacagggcaccaaggtcgagatcaag

SEQ ID NO: 1155 - protein, 124 aa, Artificial Sequence
  Description of Artificial Sequence: Synthetic polypeptide
EVQLVETGGGLVQPGGSLRLSCAASGFTFSSYAMSWVRQAPGKGLEWVSAISGSGGSTYYADSVKGRFTMSRENDKNSVFLQMNSLRVEDTGVYYCARANYKRELRYYYGMDVWGQGTMVTVSS

SEQ ID NO: 1156 - protein, 109 aa, Artificial Sequence
  Description of Artificial Sequence: Synthetic polypeptide
EIVMTQSPGTLSLSPGESATLSCRASQRVASNYLAWYQHKPGQAPSLLISGASSRATGVPDRFSGSGSGTDFTLAISRLEPEDSAVYYCQHYDSSPSWTFGQGTKVEIK

SEQ ID NO: 1157 - protein, 492 aa, Artificial Sequence
  Description of Artificial Sequence: Synthetic polypeptide
MALPVTALLLPLALLLHAARPEVQLVETGGGLVQPGGSLRLSCAASGFTFSSYAMSWVRQAPGKGLEWVSAISGSGGSTYYADSVKGRFTMSRENDKNSVFLQMNSLRVEDTGVYYCARANYKRELRYYYGMDVWGQGTMVTVSSGGGGSGGGGSGGGGSEIVMTQSPGTLSLSPGESATLSCRASQRVASNYLAWYQHKPGQAPSLLISGASSRATGVPDRFSGSGSGTDFTLAISRLEPEDSAVYYCQHYDSSPSWTFGQGTKVEIKTTTPAPRPPTPAPTIASQPLSLRPEACRPAAGGAVHTRGLDFACDIYIWAPLAGTCGVLLLSLVITLYCKRGRKKLLYIFKQPFMRPVQTTQEEDGCSCRFPEEEEGGCELRVKFSRSADAPAYKQGQNQLYNELNLGRREEYDVLDKRRGRDPEMGGKPRRKNPQEGLYNELQKDKMAEAYSEIGMKGERRRGKGHDGLYQGLSTATKDTYDALHMQALPPR

SEQ ID NO: 1158 - DNA, 1476 bp, Artificial Sequence
  Description of Artificial Sequence: Synthetic polynucleotide
atggccctccctgtcaccgccctgctgcttccgctggctcttctgctccacgccgctcggcccgaagtgcaactggtggaaaccggtggaggactcgtgcagcctggcggcagcctccggctgagctgcgccgcttcgggattcaccttttcctcctacgcgatgtcttgggtcagacaggcccccggaaaggggctggaatgggtgtcagccatctccggctccggcggatcaacgtactacgccgactccgtgaaaggccggttcaccatgtcgcgcgagaatgacaagaactccgtgttcctgcaaatgaactccctgagggtggaggacaccggagtgtactattgtgcgcgcgccaactacaagagagagctgcggtactactacggaatggacgtctggggacagggaactatggtgaccgtgtcatccggtggagggggaagcggcggtggaggcagcgggggcgggggttcagaaattgtcatgacccagtccccgggaactctttccctctcccccggggaatccgcgactttgtcctgccgggccagccagcgcgtggcctcgaactacctcgcatggtaccagcataagccaggccaagccccttccctgctgatttccggggctagcagccgcgccactggcgtgccggataggttctcgggaagcggctcgggtaccgatttcaccctggcaatctcgcggctggaaccggaggattcggccgtgtactactgccagcactatgactcatccccctcctggacattcggacagggcaccaaggtcgagatcaagaccactaccccagcaccgaggccacccaccccggctcctaccatcgcctcccagcctctgtccctgcgtccggaggcatgtagacccgcagctggtggggccgtgcatacccggggtcttgacttcgcctgcgatatctacatttgggcccctctggctggtacttgcggggtcctgctgctttcactcgtgatcactctttactgtaagcgcggtcggaagaagctgctgtacatctttaagcaacccttcatgaggcctgtgcagactactcaagaggaggacggctgttcatgccggttcccagaggaggaggaaggcggctgcgaactgcgcgtgaaattcagccgcagcgcagatgctccagcctacaagcaggggcagaaccagctctacaacgaactcaatcttggtcggagagaggagtacgacgtgctggacaagcggagaggacgggacccagaaatgggcgggaagccgcgcagaaagaatccccaagagggcctgtacaacgagctccaaaaggataagatggcagaagcctatagcgagattggtatgaaaggggaacgcagaagaggcaaaggccacgacggactgtaccagggactcagcaccgccaccaaggacacctatgacgctcttcacatgcaggccctgccgcctcgg

SEQ ID NO: 1159 - protein, 244 aa, Artificial Sequence
  Description of Artificial Sequence: Synthetic polypeptide
EVQLLETGGGLVQPGGSLRLSCAASGFSFSSYAMSWVRQAPGKGLEWVSAISGSGGSTYYADSVKGRFTISRDNSKNTLYLQMNSLRAEDTAVYYCAKALVGATGAFDIWGQGTLVTVSSGGGGSGGGGSGGGGSEIVLTQSPGTLSLSPGERATLSCRASQSLSSNFLAWYQQKPGQAPGLLIYGASNWATGTPDRFSGSGSGTDFTLTITRLEPEDFAVYYCQYYGTSPMYTFGQGTKVEIK

SEQ ID NO: 1160 - DNA, 732 bp, Artificial Sequence
  Description of Artificial Sequence: Synthetic polynucleotide
gaagtgcagctgctcgaaaccggtggagggctggtgcagccagggggctccctgaggctttcatgcgccgctagcggattctccttctcctcttacgccatgtcgtgggtccgccaagcccctggaaaaggcctggaatgggtgtccgcgatttccgggagcggaggttcgacctattacgccgactccgtgaagggccgctttaccatctcccgggataactccaagaacactctgtacctccaaatgaactcgctgagagccgaggacaccgccgtgtattactgcgcgaaggcgctggtcggcgcgactggggcattcgacatctggggacagggaactcttgtgaccgtgtcgagcggaggcggcggctccggcggaggagggagcgggggcggtggttccgaaatcgtgttgactcagtccccgggaaccctgagcttgtcacccggggagcgggccactctctcctgtcgcgcctcccaatcgctctcatccaatttcctggcctggtaccagcagaagcccggacaggccccgggcctgctcatctacggcgcttcaaactgggcaacgggaacccctgatcggttcagcggaagcggatcgggtactgactttaccctgaccatcaccagactggaaccggaggacttcgccgtgtactactgccagtactacggcacctcccccatgtacacattcggacagggtaccaaggtcgagattaag

SEQ ID NO: 1161 - protein, 120 aa, Artificial Sequence
  Description of Artificial Sequence: Synthetic polypeptide
EVQLLETGGGLVQPGGSLRLSCAASGFSFSSYAMSWVRQAPGKGLEWVSAISGSGGSTYYADSVKGRFTISRDNSKNTLYLQMNSLRAEDTAVYYCAKALVGATGAFDIWGQGTLVTVSS

SEQ ID NO: 1162 - protein, 109 aa, Artificial Sequence
  Description of Artificial Sequence: Synthetic polypeptide
EIVLTQSPGTLSLSPGERATLSCRASQSLSSNFLAWYQQKPGQAPGLLIYGASNWATGTPDRFSGSGSGTDFTLTITRLEPEDFAVYYCQYYGTSPMYTFGQGTKVEIK

SEQ ID NO: 1163 - protein, 488 aa, Artificial Sequence
  Description of Artificial Sequence: Synthetic polypeptide
MALPVTALLLPLALLLHAARPEVQLLETGGGLVQPGGSLRLSCAASGFSFSSYAMSWVRQAPGKGLEWVSAISGSGGSTYYADSVKGRFTISRDNSKNTLYLQMNSLRAEDTAVYYCAKALVGATGAFDIWGQGTLVTVSSGGGGSGGGGSGGGGSEIVLTQSPGTLSLSPGERATLSCRASQSLSSNFLAWYQQKPGQAPGLLIYGASNWATGTPDRFSGSGSGTDFTLTITRLEPEDFAVYYCQYYGTSPMYTFGQGTKVEIKTTTPAPRPPTPAPTIASQPLSLRPEACRPAAGGAVHTRGLDFACDIYIWAPLAGTCGVLLLSLVITLYCKRGRKKLLYIFKQPFMRPVQTTQEEDGCSCRFPEEEEGGCELRVKFSRSADAPAYKQGQNQLYNELNLGRREEYDVLDKRRGRDPEMGGKPRRKNPQEGLYNELQKDKMAEAYSEIGMKGERRRGKGHDGLYQGLSTATKDTYDALHMQALPPR

SEQ ID NO: 1164 - DNA, 1464 bp, Artificial Sequence
  Description of Artificial Sequence: Synthetic polynucleotide
atggccctccctgtcaccgccctgctgcttccgctggctcttctgctccacgccgctcggcccgaagtgcagctgctcgaaaccggtggagggctggtgcagccagggggctccctgaggctttcatgcgccgctagcggattctccttctcctcttacgccatgtcgtgggtccgccaagcccctggaaaaggcctggaatgggtgtccgcgatttccgggagcggaggttcgacctattacgccgactccgtgaagggccgctttaccatctcccgggataactccaagaacactctgtacctccaaatgaactcgctgagagccgaggacaccgccgtgtattactgcgcgaaggcgctggtcggcgcgactggggcattcgacatctggggacagggaactcttgtgaccgtgtcgagcggaggcggcggctccggcggaggagggagcgggggcggtggttccgaaatcgtgttgactcagtccccgggaaccctgagcttgtcacccggggagcgggccactctctcctgtcgcgcctcccaatcgctctcatccaatttcctggcctggtaccagcagaagcccggacaggccccgggcctgctcatctacggcgcttcaaactgggcaacgggaacccctgatcggttcagcggaagcggatcgggtactgactttaccctgaccatcaccagactggaaccggaggacttcgccgtgtactactgccagtactacggcacctcccccatgtacacattcggacagggtaccaaggtcgagattaagaccactaccccagcaccgaggccacccaccccggctcctaccatcgcctcccagcctctgtccctgcgtccggaggcatgtagacccgcagctggtggggccgtgcatacccggggtcttgacttcgcctgcgatatctacatttgggcccctctggctggtacttgcggggtcctgctgctttcactcgtgatcactctttactgtaagcgcggtcggaagaagctgctgtacatctttaagcaacccttcatgaggcctgtgcagactactcaagaggaggacggctgttcatgccggttcccagaggaggaggaaggcggctgcgaactgcgcgtgaaattcagccgcagcgcagatgctccagcctacaagcaggggcagaaccagctctacaacgaactcaatcttggtcggagagaggagtacgacgtgctggacaagcggagaggacgggacccagaaatgggcgggaagccgcgcagaaagaatccccaagagggcctgtacaacgagctccaaaaggataagatggcagaagcctatagcgagattggtatgaaaggggaacgcagaagaggcaaaggccacgacggactgtaccagggactcagcaccgccaccaaggacacctatgacgctcttcacatgcaggccctgccgcctcgg

SEQ ID NO: 1165 - protein, 244 aa, Artificial Sequence
  Description of Artificial Sequence: Synthetic polypeptide
EVQLLESGGGLVQPGGSLRLSCAASGFTFSSYAMSWVRQAPGKGLEWVSAISGSGGSTYYADSVKGRFTISRDNSKNTLYLQMNSLRAEDTAVYYCVLWFGEGFDPWGQGTLVTVSSGGGGSGGGGSGGGGSDIVLTQSPLSLPVTPGEPASISCRSSQSLLHSNGYNYLDWYLQKPGQSPQLLIYLGSNRASGVPDRFSGSGSGTDFTLKISRVEAEDVGVYYCMQALQTPLTFGGGTKVDIK

SEQ ID NO: 1166 - DNA, 733 bp, Artificial Sequence
  Description of Artificial Sequence: Synthetic polynucleotide
gaagtgcagctgcttgagagcggtggaggtctggtgcagcccgggggatcactgcgcctgtcctgtgccgcgtccggtttcactttctcctcgtacgccatgtcgtgggtcagacaggcaccgggaaagggactggaatgggtgtcagccatttcgggttcggggggcagcacctactacgctgactccgtgaagggccggttcaccatttcccgcgacaactccaagaacaccttgtacctccaaatgaactccctgcgggccgaagataccgccgtgtattactgcgtgctgtggttcggagagggattcgacccgtggggacaaggaacactcgtgactgtgtcatccggcggaggcggcagcggtggcggcggttccggcggcggcggatctgacatcgtgttgacccagtcccctctgagcctgccggtcactcctggcgaaccagccagcatctcctgccggtcgagccagtccctcctgcactccaatgggtacaactacctcgattggtatctgcaaaagccgggccagagcccccagctgctgatctaccttgggtcaaaccgcgcttccggggtgcctgatagattctccgggtccgggagcggaaccgactttaccctgaaaatctcgagggtggaggccgaggacgtcggagtgtactactgcatgcaggcgctccagactcccctgaccttcggaggaggaacgaaggtcgacatcaaga

SEQ ID NO: 1167 - protein, 117 aa, Artificial Sequence
  Description of Artificial Sequence: Synthetic polypeptide
EVQLLESGGGLVQPGGSLRLSCAASGFTFSSYAMSWVRQAPGKGLEWVSAISGSGGSTYYADSVKGRFTISRDNSKNTLYLQMNSLRAEDTAVYYCVLWFGEGFDPWGQGTLVTVSS

SEQ ID NO: 1168 - protein, 112 aa, Artificial Sequence
  Description of Artificial Sequence: Synthetic polypeptide
DIVLTQSPLSLPVTPGEPASISCRSSQSLLHSNGYNYLDWYLQKPGQSPQLLIYLGSNRASGVPDRFSGSGSGTDFTLKISRVEAEDVGVYYCMQALQTPLTFGGGTKVDIK

SEQ ID NO: 1169 - protein, 488 aa, Artificial Sequence
  Description of Artificial Sequence: Synthetic polypeptide
MALPVTALLLPLALLLHAARPEVQLLESGGGLVQPGGSLRLSCAASGFTFSSYAMSWVRQAPGKGLEWVSAISGSGGSTYYADSVKGRFTISRDNSKNTLYLQMNSLRAEDTAVYYCVLWFGEGFDPWGQGTLVTVSSGGGGSGGGGSGGGGSDIVLTQSPLSLPVTPGEPASISCRSSQSLLHSNGYNYLDWYLQKPGQSPQLLIYLGSNRASGVPDRFSGSGSGTDFTLKISRVEAEDVGVYYCMQALQTPLTFGGGTKVDIKTTTPAPRPPTPAPTIASQPLSLRPEACRPAAGGAVHTRGLDFACDIYIWAPLAGTCGVLLLSLVITLYCKRGRKKLLYIFKQPFMRPVQTTQEEDGCSCRFPEEEEGGCELRVKFSRSADAPAYKQGQNQLYNELNLGRREEYDVLDKRRGRDPEMGGKPRRKNPQEGLYNELQKDKMAEAYSEIGMKGERRRGKGHDGLYQGLSTATKDTYDALHMQALPPR

SEQ ID NO: 1170 - DNA, 1464 bp, Artificial Sequence
  Description of Artificial Sequence: Synthetic polynucleotide
atggccctccctgtcaccgccctgctgcttccgctggctcttctgctccacgccgctcggcccgaagtgcagctgcttgagagcggtggaggtctggtgcagcccgggggatcactgcgcctgtcctgtgccgcgtccggtttcactttctcctcgtacgccatgtcgtgggtcagacaggcaccgggaaagggactggaatgggtgtcagccatttcgggttcggggggcagcacctactacgctgactccgtgaagggccggttcaccatttcccgcgacaactccaagaacaccttgtacctccaaatgaactccctgcgggccgaagataccgccgtgtattactgcgtgctgtggttcggagagggattcgacccgtggggacaaggaacactcgtgactgtgtcatccggcggaggcggcagcggtggcggcggttccggcggcggcggatctgacatcgtgttgacccagtcccctctgagcctgccggtcactcctggcgaaccagccagcatctcctgccggtcgagccagtccctcctgcactccaatgggtacaactacctcgattggtatctgcaaaagccgggccagagcccccagctgctgatctaccttgggtcaaaccgcgcttccggggtgcctgatagattctccgggtccgggagcggaaccgactttaccctgaaaatctcgagggtggaggccgaggacgtcggagtgtactactgcatgcaggcgctccagactcccctgaccttcggaggaggaacgaaggtcgacatcaagaccactaccccagcaccgaggccacccaccccggctcctaccatcgcctcccagcctctgtccctgcgtccggaggcatgtagacccgcagctggtggggccgtgcatacccggggtcttgacttcgcctgcgatatctacatttgggcccctctggctggtacttgcggggtcctgctgctttcactcgtgatcactctttactgtaagcgcggtcggaagaagctgctgtacatctttaagcaacccttcatgaggcctgtgcagactactcaagaggaggacggctgttcatgccggttcccagaggaggaggaaggcggctgcgaactgcgcgtgaaattcagccgcagcgcagatgctccagcctacaagcaggggcagaaccagctctacaacgaactcaatcttggtcggagagaggagtacgacgtgctggacaagcggagaggacgggacccagaaatgggcgggaagccgcgcagaaagaatccccaagagggcctgtacaacgagctccaaaaggataagatggcagaagcctatagcgagattggtatgaaaggggaacgcagaagaggcaaaggccacgacggactgtaccagggactcagcaccgccaccaaggacacctatgacgctcttcacatgcaggccctgccgcctcgg

SEQ ID NO: 1171 - protein, 251 aa, Artificial Sequence
  Description of Artificial Sequence: Synthetic polypeptide
QVQLVESGGGLVQPGGSLRLSCAASGFTFSSYAMSWVRQAPGKGLEWVSAISGSGGSTYYADSVKGRFTISRDNSKNTLYLQMNSLRAEDTAVYYCAKVGYDSSGYYRDYYGMDVWGQGTTVTVSSGGGGSGGGGSGGGGSEIVLTQSPGTLSLSPGERATLSCRASQSVSSSYLAWYQQKPGQAPRLLIYGTSSRATGISDRFSGSGSGTDFTLTISRLEPEDFAVYYCQHYGNSPPKFTFGPGTKLEIK

SEQ ID NO: 1172 - DNA, 753 bp, Artificial Sequence
  Description of Artificial Sequence: Synthetic polynucleotide
caagtgcagctcgtggagtcaggcggaggactggtgcagcccgggggctccctgagactttcctgcgcggcatcgggttttaccttctcctcctatgctatgtcctgggtgcgccaggccccgggaaagggactggaatgggtgtccgcaatcagcggtagcgggggctcaacatactacgccgactccgtcaagggtcgcttcactatttcccgggacaactccaagaataccctgtacctccaaatgaacagcctcagggccgaggatactgccgtgtactactgcgccaaagtcggatacgatagctccggttactaccgggactactacggaatggacgtgtggggacagggcaccaccgtgaccgtgtcaagcggcggaggcggttcaggagggggaggctccggcggtggagggtccgaaatcgtcctgactcagtcgcctggcactctgtcgttgtccccgggggagcgcgctaccctgtcgtgtcgggcgtcgcagtccgtgtcgagctcctacctcgcgtggtaccagcagaagcccggacaggcccctagacttctgatctacggcacttcttcacgcgccaccgggatcagcgacaggttcagcggctccggctccgggaccgacttcaccctgaccattagccggctggagcctgaagatttcgccgtgtattactgccaacactacggaaactcgccgccaaagttcacgttcggacccggaaccaagctggaaatcaag

SEQ ID NO: 1173 - protein, 126 aa, Artificial Sequence
  Description of Artificial Sequence: Synthetic polypeptide
QVQLVESGGGLVQPGGSLRLSCAASGFTFSSYAMSWVRQAPGKGLEWVSAISGSGGSTYYADSVKGRFTISRDNSKNTLYLQMNSLRAEDTAVYYCAKVGYDSSGYYRDYYGMDVWGQGTTVTVSS

SEQ ID NO: 1174 - protein, 110 aa, Artificial Sequence
  Description of Artificial Sequence: Synthetic polypeptide
EIVLTQSPGTLSLSPGERATLSCRASQSVSSSYLAWYQQKPGQAPRLLIYGTSSRATGISDRFSGSGSGTDFTLTISRLEPEDFAVYYCQHYGNSPPKFTFGPGTKLEIK

SEQ ID NO: 1175 - protein, 495 aa, Artificial Sequence
  Description of Artificial Sequence: Synthetic polypeptide
MALPVTALLLPLALLLHAARPQVQLVESGGGLVQPGGSLRLSCAASGFTFSSYAMSWVRQAPGKGLEWVSAISGSGGSTYYADSVKGRFTISRDNSKNTLYLQMNSLRAEDTAVYYCAKVGYDSSGYYRDYYGMDVWGQGTTVTVSSGGGGSGGGGSGGGGSEIVLTQSPGTLSLSPGERATLSCRASQSVSSSYLAWYQQKPGQAPRLLIYGTSSRATGISDRFSGSGSGTDFTLTISRLEPEDFAVYYCQHYGNSPPKFTFGPGTKLEIKTTTPAPRPPTPAPTIASQPLSLRPEACRPAAGGAVHTRGLDFACDIYIWAPLAGTCGVLLLSLVITLYCKRGRKKLLYIFKQPFMRPVQTTQEEDGCSCRFPEEEEGGCELRVKFSRSADAPAYKQGQNQLYNELNLGRREEYDVLDKRRGRDPEMGGKPRRKNPQEGLYNELQKDKMAEAYSEIGMKGERRRGKGHDGLYQGLSTATKDTYDALHMQALPPR

SEQ ID NO: 1176 - DNA, 1485 bp, Artificial Sequence
  Description of Artificial Sequence: Synthetic polynucleotide
atggccctccctgtcaccgccctgctgcttccgctggctcttctgctccacgccgctcggccccaagtgcagctcgtggagtcaggcggaggactggtgcagcccgggggctccctgagactttcctgcgcggcatcgggttttaccttctcctcctatgctatgtcctgggtgcgccaggccccgggaaagggactggaatgggtgtccgcaatcagcggtagcgggggctcaacatactacgccgactccgtcaagggtcgcttcactatttcccgggacaactccaagaataccctgtacctccaaatgaacagcctcagggccgaggatactgccgtgtactactgcgccaaagtcggatacgatagctccggttactaccgggactactacggaatggacgtgtggggacagggcaccaccgtgaccgtgtcaagcggcggaggcggttcaggagggggaggctccggcggtggagggtccgaaatcgtcctgactcagtcgcctggcactctgtcgttgtccccgggggagcgcgctaccctgtcgtgtcgggcgtcgcagtccgtgtcgagctcctacctcgcgtggtaccagcagaagcccggacaggcccctagacttctgatctacggcacttcttcacgcgccaccgggatcagcgacaggttcagcggctccggctccgggaccgacttcaccctgaccattagccggctggagcctgaagatttcgccgtgtattactgccaacactacggaaactcgccgccaaagttcacgttcggacccggaaccaagctggaaatcaagaccactaccccagcaccgaggccacccaccccggctcctaccatcgcctcccagcctctgtccctgcgtccggaggcatgtagacccgcagctggtggggccgtgcatacccggggtcttgacttcgcctgcgatatctacatttgggcccctctggctggtacttgcggggtcctgctgctttcactcgtgatcactctttactgtaagcgcggtcggaagaagctgctgtacatctttaagcaacccttcatgaggcctgtgcagactactcaagaggaggacggctgttcatgccggttcccagaggaggaggaaggcggctgcgaactgcgcgtgaaattcagccgcagcgcagatgctccagcctacaagcaggggcagaaccagctctacaacgaactcaatcttggtcggagagaggagtacgacgtgctggacaagcggagaggacgggacccagaaatgggcgggaagccgcgcagaaagaatccccaagagggcctgtacaacgagctccaaaaggataagatggcagaagcctatagcgagattggtatgaaaggggaacgcagaagaggcaaaggccacgacggactgtaccagggactcagcaccgccaccaaggacacctatgacgctcttcacatgcaggccctgccgcctcgg

SEQ ID NO: 1177 - protein, 246 aa, Artificial Sequence
  Description of Artificial Sequence: Synthetic polypeptide
EVQLVESGGGLVQPGGSLRLSCAASGFTFSSYAMSWVRQAPGKGLEWVSAISGSGGSTYYADSVKGRFTISRDNSKNTLYLQMNSLRAEDTAVYYCAKMGWSSGYLGAFDIWGQGTTVTVSSGGGGSGGGGSGGGGSEIVLTQSPGTLSLSPGERATLSCRASQSVASSFLAWYQQKPGQAPRLLIYGASGRATGIPDRFSGSGSGTDFTLTISRLEPEDFAVYYCQHYGGSPRLTFGGGTKVDIK

SEQ ID NO: 1178 - DNA, 739 bp, Artificial Sequence
  Description of Artificial Sequence: Synthetic polynucleotide
gaagtccaactggtggagtccgggggagggctcgtgcagcccggaggcagccttcggctgtcgtgcgccgcctccgggttcacgttctcatcctacgcgatgtcgtgggtcagacaggcaccaggaaagggactggaatgggtgtccgccattagcggctccggcggtagcacctactatgccgactcagtgaagggaaggttcactatctcccgcgacaacagcaagaacaccctgtacctccaaatgaactctctgcgggccgaggataccgcggtgtactattgcgccaagatgggttggtccagcggatacttgggagccttcgacatttggggacagggcactactgtgaccgtgtcctccgggggtggcggatcgggaggcggcggctcgggtggagggggttccgaaatcgtgttgacccagtcaccgggaaccctctcgctgtccccgggagaacgggctacactgtcatgtagagcgtcccagtccgtggcttcctcgttcctggcctggtaccagcagaagccgggacaggcaccccgcctgctcatctacggagccagcggccgggcgaccggcatccctgaccgcttctccggttccggctcgggcaccgactttactctgaccattagcaggcttgagcccgaggattttgccgtgtactactgccaacactacggggggagccctcgcctgaccttcggaggcggaactaaggtcgatatcaaaa

SEQ ID NO: 1179 - protein, 122 aa, Artificial Sequence
  Description of Artificial Sequence: Synthetic polypeptide
EVQLVESGGGLVQPGGSLRLSCAASGFTFSSYAMSWVRQAPGKGLEWVSAISGSGGSTYYADSVKGRFTISRDNSKNTLYLQMNSLRAEDTAVYYCAKMGWSSGYLGAFDIWGQGTTVTVSS

SEQ ID NO: 1180 - protein, 109 aa, Artificial Sequence
  Description of Artificial Sequence: Synthetic polypeptide
EIVLTQSPGTLSLSPGERATLSCRASQSVASSFLAWYQQKPGQAPRLLIYGASGRATGIPDRFSGSGSGTDFTLTISRLEPEDFAVYYCQHYGGSPRLTFGGGTKVDIK

SEQ ID NO: 1181 - protein, 490 aa, Artificial Sequence
  Description of Artificial Sequence: Synthetic polypeptide
MALPVTALLLPLALLLHAARPEVQLVESGGGLVQPGGSLRLSCAASGFTFSSYAMSWVRQAPGKGLEWVSAISGSGGSTYYADSVKGRFTISRDNSKNTLYLQMNSLRAEDTAVYYCAKMGWSSGYLGAFDIWGQGTTVTVSSGGGGSGGGGSGGGGSEIVLTQSPGTLSLSPGERATLSCRASQSVASSFLAWYQQKPGQAPRLLIYGASGRATGIPDRFSGSGSGTDFTLTISRLEPEDFAVYYCQHYGGSPRLTFGGGTKVDIKTTTPAPRPPTPAPTIASQPLSLRPEACRPAAGGAVHTRGLDFACDIYIWAPLAGTCGVLLLSLVITLYCKRGRKKLLYIFKQPFMRPVQTTQEEDGCSCRFPEEEEGGCELRVKFSRSADAPAYKQGQNQLYNELNLGRREEYDVLDKRRGRDPEMGGKPRRKNPQEGLYNELQKDKMAEAYSEIGMKGERRRGKGHDGLYQGLSTATKDTYDALHMQALPPR

SEQ ID NO: 1182 - DNA, 1470 bp, Artificial Sequence
  Description of Artificial Sequence: Synthetic polynucleotide
atggccctccctgtcaccgccctgctgcttccgctggctcttctgctccacgccgctcggcccgaagtccaactggtggagtccgggggagggctcgtgcagcccggaggcagccttcggctgtcgtgcgccgcctccgggttcacgttctcatcctacgcgatgtcgtgggtcagacaggcaccaggaaagggactggaatgggtgtccgccattagcggctccggcggtagcacctactatgccgactcagtgaagggaaggttcactatctcccgcgacaacagcaagaacaccctgtacctccaaatgaactctctgcgggccgaggataccgcggtgtactattgcgccaagatgggttggtccagcggatacttgggagccttcgacatttggggacagggcactactgtgaccgtgtcctccgggggtggcggatcgggaggcggcggctcgggtggagggggttccgaaatcgtgttgacccagtcaccgggaaccctctcgctgtccccgggagaacgggctacactgtcatgtagagcgtcccagtccgtggcttcctcgttcctggcctggtaccagcagaagccgggacaggcaccccgcctgctcatctacggagccagcggccgggcgaccggcatccctgaccgcttctccggttccggctcgggcaccgactttactctgaccattagcaggcttgagcccgaggattttgccgtgtactactgccaacactacggggggagccctcgcctgaccttcggaggcggaactaaggtcgatatcaaaaccactaccccagcaccgaggccacccaccccggctcctaccatcgcctcccagcctctgtccctgcgtccggaggcatgtagacccgcagctggtggggccgtgcatacccggggtcttgacttcgcctgcgatatctacatttgggcccctctggctggtacttgcggggtcctgctgctttcactcgtgatcactctttactgtaagcgcggtcggaagaagctgctgtacatctttaagcaacccttcatgaggcctgtgcagactactcaagaggaggacggctgttcatgccggttcccagaggaggaggaaggcggctgcgaactgcgcgtgaaattcagccgcagcgcagatgctccagcctacaagcaggggcagaaccagctctacaacgaactcaatcttggtcggagagaggagtacgacgtgctggacaagcggagaggacgggacccagaaatgggcgggaagccgcgcagaaagaatccccaagagggcctgtacaacgagctccaaaaggataagatggcagaagcctatagcgagattggtatgaaaggggaacgcagaagaggcaaaggccacgacggactgtaccagggactcagcaccgccaccaaggacacctatgacgctcttcacatgcaggccctgccgcctcgg

SEQ ID NO: 1183 - protein, 122 aa, Artificial Sequence
  Description of Artificial Sequence: Synthetic polypeptide
QIQLVQSGPDLKKPGETVKLSCKASGYTFTNFGMNWVKQAPGKGFKWMAWINTYTGESYFADDFKGRFAFSVETSATTAYLQINNLKTEDTATYFCARGEIYYGYDGGFAYWGQGTLVTVSA

SEQ ID NO: 1184 - protein, 107 aa, Artificial Sequence
  Description of Artificial Sequence: Synthetic polypeptide
DVVMTQSHRFMSTSVGDRVSITCRASQDVNTAVSWYQQKPGQSPKLLIFSASYRYTGVPDRFTGSGSGADFTLTISSVQAEDLAVYYCQQHYSTPWTFGGGTKLDIK

SEQ ID NO: 1185 - protein, 244 aa, Artificial Sequence
  Description of Artificial Sequence: Synthetic polypeptide
QIQLVQSGPDLKKPGETVKLSCKASGYTFTNFGMNWVKQAPGKGFKWMAWINTYTGESYFADDFKGRFAFSVETSATTAYLQINNLKTEDTATYFCARGEIYYGYDGGFAYWGQGTLVTVSAGGGGSGGGGSGGGGSDVVMTQSHRFMSTSVGDRVSITCRASQDVNTAVSWYQQKPGQSPKLLIFSASYRYTGVPDRFTGSGSGADFTLTISSVQAEDLAVYYCQQHYSTPWTFGGGTKLDIK

SEQ ID NO: 1186 - protein, 467 aa, Artificial Sequence
  Description of Artificial Sequence: Synthetic polypeptide
QIQLVQSGPDLKKPGETVKLSCKASGYTFTNFGMNWVKQAPGKGFKWMAWINTYTGESYFADDFKGRFAFSVETSATTAYLQINNLKTEDTATYFCARGEIYYGYDGGFAYWGQGTLVTVSAGGGGSGGGGSGGGGSDVVMTQSHRFMSTSVGDRVSITCRASQDVNTAVSWYQQKPGQSPKLLIFSASYRYTGVPDRFTGSGSGADFTLTISSVQAEDLAVYYCQQHYSTPWTFGGGTKLDIKTTTPAPRPPTPAPTIASQPLSLRPEACRPAAGGAVHTRGLDFACDIYIWAPLAGTCGVLLLSLVITLYCKRGRKKLLYIFKQPFMRPVQTTQEEDGCSCRFPEEEEGGCELRVKFSRSADAPAYKQGQNQLYNELNLGRREEYDVLDKRRGRDPEMGGKPRRKNPQEGLYNELQKDKMAEAYSEIGMKGERRRGKGHDGLYQGLSTATKDTYDALHMQALPPR

SEQ ID NO: 1187 - protein, 117 aa, Artificial Sequence
  Description of Artificial Sequence: Synthetic polypeptide
QIQLVQSGPELKKPGETVKISCKASGYTFTDYSINWVKRAPGKGLKWMGWINTETREPAYAYDFRGRFAFSLETSASTAYLQINNLKYEDTATYFCALDYSYAMDYWGQGTSVTVSS

SEQ ID NO: 1188 - protein, 111 aa, Artificial Sequence
  Description of Artificial Sequence: Synthetic polypeptide
DIVLTQSPASLAMSLGKRATISCRASESVSVIGAHLIHWYQQKPGQPPKLLIYLASNLETGVPARFSGSGSGTDFTLTIDPVEEDDVAIYSCLQSRIFPRTFGGGTKLEIK

SEQ ID NO: 1189 - protein, 249 aa, Artificial Sequence
  Description of Artificial Sequence: Synthetic polypeptide
QIQLVQSGPELKKPGETVKISCKASGYTFTDYSINWVKRAPGKGLKWMGWINTETREPAYAYDFRGRFAFSLETSASTAYLQINNLKYEDTATYFCALDYSYAMDYWGQGTSVTVSSGGGGSGGGGSGGGGSQIQLVQSGPELKKPGETVKISCKASGYTFTDYSINWVKRAPGKGLKWMGWINTETREPAYAYDFRGRFAFSLETSASTAYLQINNLKYEDTATYFCALDYSYAMDYWGQGTSVTVSS

SEQ ID NO: 1190 - protein, 472 aa, Artificial Sequence
  Description of Artificial Sequence: Synthetic polypeptide
QIQLVQSGPELKKPGETVKISCKASGYTFTDYSINWVKRAPGKGLKWMGWINTETREPAYAYDFRGRFAFSLETSASTAYLQINNLKYEDTATYFCALDYSYAMDYWGQGTSVTVSSGGGGSGGGGSGGGGSQIQLVQSGPELKKPGETVKISCKASGYTFTDYSINWVKRAPGKGLKWMGWINTETREPAYAYDFRGRFAFSLETSASTAYLQINNLKYEDTATYFCALDYSYAMDYWGQGTSVTVSSTTTPAPRPPTPAPTIASQPLSLRPEACRPAAGGAVHTRGLDFACDIYIWAPLAGTCGVLLLSLVITLYCKRGRKKLLYIFKQPFMRPVQTTQEEDGCSCRFPEEEEGGCELRVKFSRSADAPAYKQGQNQLYNELNLGRREEYDVLDKRRGRDPEMGGKPRRKNPQEGLYNELQKDKMAEAYSEIGMKGERRRGKGHDGLYQGLSTATKDTYDALHMQALPPR

SEQ ID NO: 1191 - protein, 117 aa, Artificial Sequence
  Description of Artificial Sequence: Synthetic polypeptide
QIQLVQSGPELKKPGETVKISCKASGYTFRHYSMNWVKQAPGKGLKWMGRINTESGVPIYADDFKGRFAFSVETSASTAYLVINNLKDEDTASYFCSNDYLYSLDFWGQGTALTVSS

SEQ ID NO: 1192 - protein, 111 aa, Artificial Sequence
  Description of Artificial Sequence: Synthetic polypeptide
DIVLTQSPPSLAMSLGKRATISCRASESVTILGSHLIYWYQQKPGQPPTLLIQLASNVQTGVPARFSGSGSRTDFTLTIDPVEEDDVAVYYCLQSRTIPRTFGGGTKLEIK

SEQ ID NO: 1193 - protein, 243 aa, Artificial Sequence
  Description of Artificial Sequence: Synthetic polypeptide
QIQLVQSGPELKKPGETVKISCKASGYTFRHYSMNWVKQAPGKGLKWMGRINTESGVPIYADDFKGRFAFSVETSASTAYLVINNLKDEDTASYFCSNDYLYSLDFWGQGTALTVSSGGGGSGGGGSGGGGSDIVLTQSPPSLAMSLGKRATISCRASESVTILGSHLIYWYQQKPGQPPTLLIQLASNVQTGVPARFSGSGSRTDFTLTIDPVEEDDVAVYYCLQSRTIPRTFGGGTKLEIK

SEQ ID NO: 1194 - protein, 466 aa, Artificial Sequence
  Description of Artificial Sequence: Synthetic polypeptide
QIQLVQSGPELKKPGETVKISCKASGYTFRHYSMNWVKQAPGKGLKWMGRINTESGVPIYADDFKGRFAFSVETSASTAYLVINNLKDEDTASYFCSNDYLYSLDFWGQGTALTVSSGGGGSGGGGSGGGGSDIVLTQSPPSLAMSLGKRATISCRASESVTILGSHLIYWYQQKPGQPPTLLIQLASNVQTGVPARFSGSGSRTDFTLTIDPVEEDDVAVYYCLQSRTIPRTFGGGTKLEIKTTTPAPRPPTPAPTIASQPLSLRPEACRPAAGGAVHTRGLDFACDIYIWAPLAGTCGVLLLSLVITLYCKRGRKKLLYIFKQPFMRPVQTTQEEDGCSCRFPEEEEGGCELRVKFSRSADAPAYKQGQNQLYNELNLGRREEYDVLDKRRGRDPEMGGKPRRKNPQEGLYNELQKDKMAEAYSEIGMKGERRRGKGHDGLYQGLSTATKDTYDALHMQALPPR

SEQ ID NO: 1195 - protein, 117 aa, Artificial Sequence
  Description of Artificial Sequence: Synthetic polypeptide
QIQLVQSGPELKKPGETVKISCKASGYTFTHYSMNWVKQAPGKGLKWMGRINTETGEPLYADDFKGRFAFSLETSASTAYLVINNLKNEDTATFFCSNDYLYSCDYWGQGTTLTVSS

SEQ ID NO: 1196 - protein, 111 aa, Artificial Sequence; identical to SEQ ID NO: 1192
  Description of Artificial Sequence: Synthetic polypeptide

SEQ ID NO: 1197 - protein, 243 aa, Artificial Sequence
  Description of Artificial Sequence: Synthetic polypeptide
QIQLVQSGPELKKPGETVKISCKASGYTFTHYSMNWVKQAPGKGLKWMGRINTETGEPLYADDFKGRFAFSLETSASTAYLVINNLKNEDTATFFCSNDYLYSCDYWGQGTTLTVSSGGGGSGGGGSGGGGSDIVLTQSPPSLAMSLGKRATISCRASESVTILGSHLIYWYQQKPGQPPTLLIQLASNVQTGVPARFSGSGSRTDFTLTIDPVEEDDVAVYYCLQSRTIPRTFGGGTKLEIK

SEQ ID NO: 1198 - protein, 466 aa, Artificial Sequence
  Description of Artificial Sequence: Synthetic polypeptide
QIQLVQSGPELKKPGETVKISCKASGYTFTHYSMNWVKQAPGKGLKWMGRINTETGEPLYADDFKGRFAFSLETSASTAYLVINNLKNEDTATFFCSNDYLYSCDYWGQGTTLTVSSGGGGSGGGGSGGGGSDIVLTQSPPSLAMSLGKRATISCRASESVTILGSHLIYWYQQKPGQPPTLLIQLASNVQTGVPARFSGSGSRTDFTLTIDPVEEDDVAVYYCLQSRTIPRTFGGGTKLEIKTTTPAPRPPTPAPTIASQPLSLRPEACRPAAGGAVHTRGLDFACDIYIWAPLAGTCGVLLLSLVITLYCKRGRKKLLYIFKQPFMRPVQTTQEEDGCSCRFPEEEEGGCELRVKFSRSADAPAYKQGQNQLYNELNLGRREEYDVLDKRRGRDPEMGGKPRRKNPQEGLYNELQKDKMAEAYSEIGMKGERRRGKGHDGLYQGLSTATKDTYDALHMQALPPR

SEQ ID NO: 1199 - protein, 5 aa, Artificial Sequence
  Description of Artificial Sequence: Synthetic peptide
NHGMS

SEQ ID NO: 1200 - protein, 5 aa, Artificial Sequence
  Description of Artificial Sequence: Synthetic peptide
NYAMS

SEQ ID NO: 1201 - protein, 5 aa, Artificial Sequence
  Description of Artificial Sequence: Synthetic peptide
DYAMH

SEQ ID NO: 1202 - protein, 5 aa, Artificial Sequence
  Description of Artificial Sequence: Synthetic peptide
NHGMS

SEQ ID NO: 1203 - protein, 5 aa, Artificial Sequence
  Description of Artificial Sequence: Synthetic peptide
NFGIN

SEQ ID NO: 1204 - protein, 5 aa, Artificial Sequence
  Description of Artificial Sequence: Synthetic peptide
SDAMT

SEQ ID NO: 1205 - protein, 5 aa, Artificial Sequence
  Description of Artificial Sequence: Synthetic peptide
NYGIT

SEQ ID NO: 1206 - protein, 5 aa, Artificial Sequence
  Description of Artificial Sequence: Synthetic peptide
NHGMS

SEQ ID NO: 1207 - protein, 5 aa, Artificial Sequence
  Description of Artificial Sequence: Synthetic peptide
NHGMS

SEQ ID NO: 1208 - protein, 5 aa, Artificial Sequence
  Description of Artificial Sequence: Synthetic peptide
NHGMS

SEQ ID NO: 1209 - protein, 5 aa, Artificial Sequence
  Description of Artificial Sequence: Synthetic peptide
DYYMS

SEQ ID NO: 1210 - protein, 5 aa, Artificial Sequence
  Description of Artificial Sequence: Synthetic peptide
DYYMS

SEQ ID NO: 1211 - protein, 5 aa, Artificial Sequence
  Description of Artificial Sequence: Synthetic peptide
NHGMS

SEQ ID NO: 1212 - protein, 5 aa, Artificial Sequence
  Description of Artificial Sequence: Synthetic peptide
NHGMS

SEQ ID NO: 1213 - protein, 5 aa, Artificial Sequence
  Description of Artificial Sequence: Synthetic peptide
NHGMS

SEQ ID NO: 1214 - protein, 7 aa, Artificial Sequence
  Description of Artificial Sequence: Synthetic peptide
SSYYYWG

SEQ ID NO: 1215 - protein, 7 aa, Artificial Sequence
  Description of Artificial Sequence: Synthetic peptide
TSGMCVS

SEQ ID NO: 1216 - protein, 5 aa, Artificial Sequence
  Description of Artificial Sequence: Synthetic peptide
SYSMN

SEQ ID NO: 1217 - protein, 5 aa, Artificial Sequence
  Description of Artificial Sequence: Synthetic peptide
DYYMS

SEQ ID NO: 1218 - protein, 5 aa, Artificial Sequence
  Description of Artificial Sequence: Synthetic peptide
SHYIH

SEQ ID NO: 1219 - protein, 7 aa, Artificial Sequence
  Description of Artificial Sequence: Synthetic peptide
SGGYYWS

SEQ ID NO: 1220 - protein, 5 aa, Artificial Sequence
  Description of Artificial Sequence: Synthetic peptide
SYAIS

SEQ ID NO: 1221 - protein, 7 aa, Artificial Sequence
  Description of Artificial Sequence: Synthetic peptide
SNSAAWN

SEQ ID NO: 1222 - protein, 5 aa, Artificial Sequence
  Description of Artificial Sequence: Synthetic peptide
SYAMS

SEQ ID NO: 1223 - protein, 5 aa, Artificial Sequence
  Description of Artificial Sequence: Synthetic peptide
RYPMS

SEQ ID NO: 1224 - protein, 5 aa, Artificial Sequence
  Description of Artificial Sequence: Synthetic peptide
SYAMS

SEQ ID NO: 1225 - protein, 5 aa, Artificial Sequence
  Description of Artificial Sequence: Synthetic peptide
SYAMS

SEQ ID NO: 1226 - protein, 5 aa, Artificial Sequence
  Description of Artificial Sequence: Synthetic peptide
DYAMH

SEQ ID NO: 1227 - protein, 5 aa, Artificial Sequence
  Description of Artificial Sequence: Synthetic peptide
DYAMH

SEQ ID NO: 1228 - protein, 5 aa, Artificial Sequence
  Description of Artificial Sequence: Synthetic peptide
SYAMS

SEQ ID NO: 1229 - protein, 5 aa, Artificial Sequence
  Description of Artificial Sequence: Synthetic peptide
SYAMS

SEQ ID NO: 1230 - protein, 5 aa, Artificial Sequence
  Description of Artificial Sequence: Synthetic peptide
SYAMS

SEQ ID NO: 1231 - protein, 5 aa, Artificial Sequence
  Description of Artificial Sequence: Synthetic peptide
SYAMS

SEQ ID NO: 1232 - protein, 5 aa, Artificial Sequence
  Description of Artificial Sequence: Synthetic peptide
SYAMS

SEQ ID NO: 1233 - protein, 5 aa, Artificial Sequence
  Description of Artificial Sequence: Synthetic peptide
SYAMS

SEQ ID NO: 1234 - protein, 5 aa, Artificial Sequence
  Description of Artificial Sequence: Synthetic peptide
SYAMS

SEQ ID NO: 1235 - protein, 5 aa, Artificial Sequence
  Description of Artificial Sequence: Synthetic peptide
NFGMN

SEQ ID NO: 1236 - protein, 5 aa, Artificial Sequence
  Description of Artificial Sequence: Synthetic peptide
DYSIN

SEQ ID NO: 1237 - protein, 5 aa, Artificial Sequence
  Description of Artificial Sequence: Synthetic peptide
HYSMN

SEQ ID NO: 1238 - protein, 5 aa, Artificial Sequence
  Description of Artificial Sequence: Synthetic peptide
HYSMN

SEQ ID NO: 1239 - protein, 16 aa, Artificial Sequence
  Description of Artificial Sequence: Synthetic peptide
GIVYSGSTYYAASVKG

SEQ ID NO: 1240 - protein, 17 aa, Artificial Sequence
  Description of Artificial Sequence: Synthetic peptide
GISRSGENTYYADSVKG

SEQ ID NO: 1241 - protein, 17 aa, Artificial Sequence
  Description of Artificial Sequence: Synthetic peptide
GISWNSGSIGYADSVKG

SEQ ID NO: 1242 - protein, 16 aa, Artificial Sequence
  Description of Artificial Sequence: Synthetic peptide
GIVYSGSTYYAASVKG

SEQ ID NO: 1243 - protein, 17 aa, Artificial Sequence
  Description of Artificial Sequence: Synthetic peptide
WINPKNNNTNYAQKFQG

SEQ ID NO: 1244 - protein, 17 aa, Artificial Sequence
  Description of Artificial Sequence: Synthetic peptide
VISGSGGTTYYADSVKG

SEQ ID NO: 1245 - protein, 17 aa, Artificial Sequence
  Description of Artificial Sequence: Synthetic peptide
WISAYNGNTNYAQKFQG

SEQ ID NO: 1246 - protein, 16 aa, Artificial Sequence
  Description of Artificial Sequence: Synthetic peptide
GIVYSGSTYYAASVKG

SEQ ID NO: 1247 - protein, 16 aa, Artificial Sequence
  Description of Artificial Sequence: Synthetic peptide
GIVYSGSTYYAASVKG

SEQ ID NO: 1248 - protein, 16 aa, Artificial Sequence
  Description of Artificial Sequence: Synthetic peptide
GIVYSGSTYYAASVKG

SEQ ID NO: 1249 - protein, 17 aa, Artificial Sequence
  Description of Artificial Sequence: Synthetic peptide
YISSSGSTIYYADSVKG

SEQ ID NO: 1250 - protein, 17 aa, Artificial Sequence
  Description of Artificial Sequence: Synthetic peptide
YISSSGNTIYYADSVKG

SEQ ID NO: 1251 - protein, 16 aa, Artificial Sequence
  Description of Artificial Sequence: Synthetic peptide
GIVYSGSTYYAASVKG

SEQ ID NO: 1252 - protein, 16 aa, Artificial Sequence
  Description of Artificial Sequence: Synthetic peptide
GIVYSGSTYYAASVKG

SEQ ID NO: 1253 - protein, 16 aa, Artificial Sequence
  Description of Artificial Sequence: Synthetic peptide
GIVYSGSTYYAASVKG

SEQ ID NO: 1254 - protein, 16 aa, Artificial Sequence
  Description of Artificial Sequence: Synthetic peptide
SIYYSGSAYYNPSLKS

SEQ ID NO: 1255 - protein, 16 aa, Artificial Sequence
  Description of Artificial Sequence: Synthetic peptide
RIDWDEDKFYSTSLKT

SEQ ID NO: 1256 - protein, 17 aa, Artificial Sequence
  Description of Artificial Sequence: Synthetic peptide
SISSSSSYIYYADSVKG

SEQ ID NO: 1257 - protein, 17 aa, Artificial Sequence
  Description of Artificial Sequence: Synthetic peptide
YISSSGSTIYYADSVKG

SEQ ID NO: 1258 - protein, 17 aa, Artificial Sequence
  Description of Artificial Sequence: Synthetic peptide
MINPSGGVTAYSQTLQG

SEQ ID NO: 1259 - protein, 16 aa, Artificial Sequence
  Description of Artificial Sequence: Synthetic peptide
YIYYSGSTYYNPSLKS

SEQ ID NO: 1260 - protein, 17 aa, Artificial Sequence
  Description of Artificial Sequence: Synthetic peptide
GIIPIFGTANYAQKFQG

SEQ ID NO: 1261 - protein, 18 aa, Artificial Sequence
  Description of Artificial Sequence: Synthetic peptide
RTYYRSKWYSFYAISLKS

SEQ ID NO: 1262 - protein, 17 aa, Artificial Sequence
  Description of Artificial Sequence: Synthetic peptide
AISGSGGSTYYADSVKG

SEQ ID NO: 1263 - protein, 17 aa, Artificial Sequence
  Description of Artificial Sequence: Synthetic peptide
GISDSGVSTYYADSAKG

SEQ ID NO: 1264 - protein, 17 aa, Artificial Sequence
  Description of Artificial Sequence: Synthetic peptide
AISGSGGSTYYADSVKG

SEQ ID NO: 1265 - protein, 17 aa, Artificial Sequence
  Description of Artificial Sequence: Synthetic peptide
AISGSGGSTYYADSVKG

SEQ ID NO: 1266 - protein, 17 aa, Artificial Sequence
  Description of Artificial Sequence: Synthetic peptide
GISWNSGSIGYADSVKG

SEQ ID NO: 1267 - protein, 17 aa, Artificial Sequence
  Description of Artificial Sequence: Synthetic peptide
SINWKGNSLAYGDSVKG

SEQ ID NO: 1268 - protein, 17 aa, Artificial Sequence
  Description of Artificial Sequence: Synthetic peptide
AISGSGGSTYYADSVKG

SEQ ID NO: 1269 - protein, 17 aa, Artificial Sequence
  Description of Artificial Sequence: Synthetic peptide
AISGSGGSTYYADSVKG

SEQ ID NO: 1270 - protein, 17 aa, Artificial Sequence
  Description of Artificial Sequence: Synthetic peptide
AISGSGGSTYYADSVKG

SEQ ID NO: 1271 - protein, 17 aa, Artificial Sequence
  Description of Artificial Sequence: Synthetic peptide
AISGSGGSTYYADSVKG

SEQ ID NO: 1272 - protein, 17 aa, Artificial Sequence
  Description of Artificial Sequence: Synthetic peptide
AISGSGGSTYYADSVKG

SEQ ID NO: 1273 - protein, 17 aa, Artificial Sequence
  Description of Artificial Sequence: Synthetic peptide
AISGSGGSTYYADSVKG

SEQ ID NO: 1274 - protein, 17 aa, Artificial Sequence
  Description of Artificial Sequence: Synthetic peptide
AISGSGGSTYYADSVKG

SEQ ID NO: 1275 - protein, 17 aa, Artificial Sequence
  Description of Artificial Sequence: Synthetic peptide
WINTYTGESYFADDFKG

SEQ ID NO: 1276 - protein, 17 aa, Artificial Sequence
  Description of Artificial Sequence: Synthetic peptide
WINTETREPAYAYDFRG

SEQ ID NO: 1277 - protein, 17 aa, Artificial Sequence
  Description of Artificial Sequence: Synthetic peptide
RINTESGVPIYADDFKG

SEQ ID NO: 1278 - protein, 17 aa, Artificial Sequence
  Description of Artificial Sequence: Synthetic peptide
RINTETGEPLYADDFKG

SEQ ID NO: 1279 - protein, 7 aa, Artificial Sequence
  Description of Artificial Sequence: Synthetic peptide
HGGESDV

SEQ ID NO: 1280 - protein, 11 aa, Artificial Sequence
  Description of Artificial Sequence: Synthetic peptide
SPAHYYGGMDV

SEQ ID NO: 1281 - protein, 6 aa, Artificial Sequence
  Description of Artificial Sequence: Synthetic peptide
HSFLAY

SEQ ID NO: 1282 - protein, 7 aa, Artificial Sequence
  Description of Artificial Sequence: Synthetic peptide
HGGESDV

SEQ ID NO: 1283 - protein, 11 aa, Artificial Sequence
  Description of Artificial Sequence: Synthetic peptide
GPYYYQSYMDV

SEQ ID NO: 1284 - protein, 14 aa, Artificial Sequence
  Description of Artificial Sequence: Synthetic peptide
LDSSGYYYARGPRY

SEQ ID NO: 1285 - protein, 9 aa, Artificial Sequence
  Description of Artificial Sequence: Synthetic peptide
GPYYYYMDV

SEQ ID NO: 1286 - protein, 7 aa, Artificial Sequence
  Description of Artificial Sequence: Synthetic peptide
HGGESDV

SEQ ID NO: 1287 - protein, 7 aa, Artificial Sequence
  Description of Artificial Sequence: Synthetic peptide
HGGESDV

SEQ ID NO: 1288 - protein, 7 aa, Artificial Sequence
  Description of Artificial Sequence: Synthetic peptide
HGGESDV

SEQ ID NO: 1289 - protein, 8 aa, Artificial Sequence
  Description of Artificial Sequence: Synthetic peptide
ESGDGMDV

SEQ ID NO: 1290 - protein, 8 aa, Artificial Sequence
  Description of Artificial Sequence: Synthetic peptide
STMVREDY

SEQ ID NO: 1291 - protein, 7 aa, Artificial Sequence
  Description of Artificial Sequence: Synthetic peptide
HGGESDV

SEQ ID NO: 1292 - protein, 7 aa, Artificial Sequence
  Description of Artificial Sequence: Synthetic peptide
HGGESDV

SEQ ID NO: 1293 - protein, 7 aa, Artificial Sequence
  Description of Artificial Sequence: Synthetic peptide
HGGESDV

SEQ ID NO: 1294 - protein, 11 aa, Artificial Sequence
  Description of Artificial Sequence: Synthetic peptide
HWQEWPDAFDI

SEQ ID NO: 1295 - protein, 13 aa, Artificial Sequence
  Description of Artificial Sequence: Synthetic peptide
SGAGGTSATAFDI

SEQ ID NO: 1296 - protein, 10 aa, Artificial Sequence
  Description of Artificial Sequence: Synthetic peptide
TIAAVYAFDI

SEQ ID NO: 1297 - protein, 8 aa, Artificial Sequence
  Description of Artificial Sequence: Synthetic peptide
DLRGAFDI

SEQ ID NO: 1298 - protein, 11 aa, Artificial Sequence
  Description of Artificial Sequence: Synthetic peptide
EGSGSGWYFDF

SEQ ID NO: 1299 - protein, 13 aa, Artificial Sequence
  Description of Artificial Sequence: Synthetic peptide
AGIAARLRGAFDI

SEQ ID NO: 1300 - protein, 20 aa, Artificial Sequence
  Description of Artificial Sequence: Synthetic peptide
RGGYQLLRWDVGLLRSAFDI

SEQ ID NO: 1301 - protein, 13 aa, Artificial Sequence
  Description of Artificial Sequence: Synthetic peptide
SSPEGLFLYWFDP

SEQ ID NO: 1302 - protein, 9 aa, Artificial Sequence
  Description of Artificial Sequence: Synthetic peptide
VEGSGSLDY

SEQ ID NO: 1303 - protein, 9 aa, Artificial Sequence
  Description of Artificial Sequence: Synthetic peptide
RAGSEASDI

SEQ ID NO: 1304 - protein, 15 aa, Artificial Sequence
  Description of Artificial Sequence: Synthetic peptide
ATYKRELRYYYGMDV

SEQ ID NO: 1305 - protein, 15 aa, Artificial Sequence
  Description of Artificial Sequence: Synthetic peptide
ATYKRELRYYYGMDV

SEQ ID NO: 1306 - protein, 8 aa, Artificial Sequence
  Description of Artificial Sequence: Synthetic peptide
VGKAVPDV

SEQ ID NO: 1307 - protein, 13 aa, Artificial Sequence
  Description of Artificial Sequence: Synthetic peptide
HQGVAYYNYAMDV

SEQ ID NO: 1308 - protein, 8 aa, Artificial Sequence
  Description of Artificial Sequence: Synthetic peptide
VVRDGMDV

SEQ ID NO: 1309 - protein, 9 aa, Artificial Sequence
  Description of Artificial Sequence: Synthetic peptide
IPQTGTFDY

SEQ ID NO: 1310 - protein, 15 aa, Artificial Sequence
  Description of Artificial Sequence: Synthetic peptide
ANYKRELRYYYGMDV

SEQ ID NO: 1311 - protein, 11 aa, Artificial Sequence
  Description of Artificial Sequence: Synthetic peptide
ALVGATGAFDI

SEQ ID NO: 1312 - protein, 8 aa, Artificial Sequence
  Description of Artificial Sequence: Synthetic peptide
WFGEGFDP

SEQ ID NO: 1313 - protein, 17 aa, Artificial Sequence
  Description of Artificial Sequence: Synthetic peptide
VGYDSSGYYRDYYGMDV

SEQ ID NO: 1314 - protein, 13 aa, Artificial Sequence
  Description of Artificial Sequence: Synthetic peptide
MGWSSGYLGAFDI

SEQ ID NO: 1315 - protein, 13 aa, Artificial Sequence
  Description of Artificial Sequence: Synthetic peptide
GEIYYGYDGGFAY

SEQ ID NO: 1316 - protein, 8 aa, Artificial Sequence
  Description of Artificial Sequence: Synthetic peptide
DYSYAMDY

SEQ ID NO: 1317 - protein, 8 aa, Artificial Sequence
  Description of Artificial Sequence: Synthetic peptide
DYLYSLDF

SEQ ID NO: 1318 - protein, 8 aa, Artificial Sequence
  Description of Artificial Sequence: Synthetic peptide
DYLYSCDY

SEQ ID NO: 1319 - protein, 11 aa, Artificial Sequence
  Description of Artificial Sequence: Synthetic peptide
RASQSISSYLN

SEQ ID NO: 1320 - protein, 12 aa, Artificial Sequence
  Description of Artificial Sequence: Synthetic peptide
RASQSISSSFLA

SEQ ID NO: 1321 - protein, 16 aa, Artificial Sequence
  Description of Artificial Sequence: Synthetic peptide
RSSQSLLHSNGYNYLD

SEQ ID NO: 1322 - protein, 16 aa, Artificial Sequence
  Description of Artificial Sequence: Synthetic peptide
KSSQSLLRNDGKTPLY

SEQ ID NO: 1323 - protein, 16 aa, Artificial Sequence
  Description of Artificial Sequence: Synthetic peptide
RSSQSLLHSNGYNYLN

SEQ ID NO: 1324 - protein, 11 aa, Artificial Sequence
  Description of Artificial Sequence: Synthetic peptide
RASQSISSYLN

SEQ ID NO: 1325 - protein, 16 aa, Artificial Sequence
  Description of Artificial Sequence: Synthetic peptide
RSSQSLLYSNGYNYVD

SEQ ID NO: 1326 - protein, 11 aa, Artificial Sequence
  Description of Artificial Sequence: Synthetic peptide
RASQSVSSNLA

SEQ ID NO: 1327 - protein, 11 aa, Artificial Sequence
  Description of Artificial Sequence: Synthetic peptide
RASQSVSSKLA

SEQ ID NO: 1328 - protein, 12 aa, Artificial Sequence
  Description of Artificial Sequence: Synthetic peptide
RASQSVGSTNLA

SEQ ID NO: 1329 - protein, 11 aa, Artificial Sequence
  Description of Artificial Sequence: Synthetic peptide
RASQSISSYLN

SEQ ID NO: 1330 - protein, 16 aa, Artificial Sequence
  Description of Artificial Sequence: Synthetic peptide
KSSESLVHNSGKTYLN

SEQ ID NO: 1331 - protein, 11 aa, Artificial Sequence
  Description of Artificial Sequence: Synthetic peptide
QASEDINKFLN

SEQ ID NO: 1332 - protein, 11 aa, Artificial Sequence
  Description of Artificial Sequence: Synthetic peptide
RASQSVGSNLA

SEQ ID NO: 1333 - protein, 12 aa, Artificial Sequence
  Description of Artificial Sequence: Synthetic peptide
RASQSIGSSSLA

SEQ ID NO: 1334 - protein, 11 aa, Artificial Sequence
  Description of Artificial Sequence: Synthetic peptide
KASQDIDDAMN

SEQ ID NO: 1335 - protein, 11 aa, Artificial Sequence
  Description of Artificial Sequence: Synthetic peptide
RASQDIYNNLA

SEQ ID NO: 1336 - protein, 16 aa, Artificial Sequence
  Description of Artificial Sequence: Synthetic peptide
RSSQSLLHSNGYNYLD

SEQ ID NO: 1337 - protein, 11 aa, Artificial Sequence
  Description of Artificial Sequence: Synthetic peptide
GGNNIGTKSVH

SEQ ID NO: 1338 - protein, 11 aa, Artificial Sequence
  Description of Artificial Sequence: Synthetic peptide
SGDGLSKKYVS

SEQ ID NO: 1339 - protein, 11 aa, Artificial Sequence
  Description of Artificial Sequence: Synthetic peptide
RASQGIRNWLA

SEQ ID NO: 1340 - protein, 11 aa, Artificial Sequence
  Description of Artificial Sequence: Synthetic peptide
GGNNIGSKSVH

SEQ ID NO: 1341 - protein, 11 aa, Artificial Sequence
  Description of Artificial Sequence: Synthetic peptide
QGDSLGNYYAT

SEQ ID NO: 1342 - protein, 12 aa, Artificial Sequence
  Description of Artificial Sequence: Synthetic peptide
RASQSVSSAYLA

SEQ ID NO: 1343 - protein, 11 aa, Artificial Sequence
  Description of Artificial Sequence: Synthetic peptide
RASQSVSNSLA

SEQ ID NO: 1344 - protein, 12 aa, Artificial Sequence
  Description of Artificial Sequence: Synthetic peptide
RASQSVSSSFLA

SEQ ID NO: 1345 - protein, 12 aa, Artificial Sequence
  Description of Artificial Sequence: Synthetic peptide
RASQSVSTTFLA

SEQ ID NO: 1346 - protein, 11 aa, Artificial Sequence
  Description of Artificial Sequence: Synthetic peptide
RASQSISSYLN

SEQ ID NO: 1347 - protein, 12 aa, Artificial Sequence
  Description of Artificial Sequence: Synthetic peptide
RATQSIGSSFLA

SEQ ID NO: 1348 - protein, 12 aa, Artificial Sequence
  Description of Artificial Sequence: Synthetic peptide
RASQSVSSSYLA

SEQ ID NO: 1349 - protein, 12 aa, Artificial Sequence
  Description of Artificial Sequence: Synthetic peptide
RASQSVSSSYLA

SEQ ID NO: 1350 - protein, 12 aa, Artificial Sequence
  Description of Artificial Sequence: Synthetic peptide
RASQRVASNYLA

SEQ ID NO: 1351 - protein, 12 aa, Artificial Sequence
  Description of Artificial Sequence: Synthetic peptide
RASQSLSSNFLA

SEQ ID NO: 1352 - protein, 16 aa, Artificial Sequence
  Description of Artificial Sequence: Synthetic peptide
RSSQSLLHSNGYNYLD

SEQ ID NO: 1353 - protein, 12 aa, Artificial Sequence
  Description of Artificial Sequence: Synthetic peptide
RASQSVSSSYLA

SEQ ID NO: 1354 - protein, 12 aa, Artificial Sequence
  Description of Artificial Sequence: Synthetic peptide
RASQSVASSFLA

SEQ ID NO: 1355 - protein, 11 aa, Artificial Sequence
  Description of Artificial Sequence: Synthetic peptide
RASQDVNTAVS

SEQ ID NO: 1356 - protein, 15 aa, Artificial Sequence
  Description of Artificial Sequence: Synthetic peptide
RASESVSVIGAHLIH

SEQ ID NO: 1357 - protein, 15 aa, Artificial Sequence
  Description of Artificial Sequence: Synthetic peptide
RASESVTILGSHLIY

SEQ ID NO: 1358 - protein, 15 aa, Artificial Sequence
  Description of Artificial Sequence: Synthetic peptide
RASESVTILGSHLIY

SEQ ID NO: 1359 - protein, 7 aa, Artificial Sequence
  Description of Artificial Sequence: Synthetic peptide
AASSLQS

SEQ ID NO: 1360 - protein, 7 aa, Artificial Sequence
  Description of Artificial Sequence: Synthetic peptide
GASRRAT

SEQ ID NO: 1361 - protein, 7 aa, Artificial Sequence
  Description of Artificial Sequence: Synthetic peptide
LGSNRAS

SEQ ID NO: 1362 - protein, 7 aa, Artificial Sequence
  Description of Artificial Sequence: Synthetic peptide
EVSNRFS

SEQ ID NO: 1363 - protein, 7 aa, Artificial Sequence
  Description of Artificial Sequence: Synthetic peptide
LGSKRAS

SEQ ID NO: 1364 - protein, 7 aa, Artificial Sequence
  Description of Artificial Sequence: Synthetic peptide
GASTLAS

SEQ ID NO: 1365 - protein, 7 aa, Artificial Sequence
  Description of Artificial Sequence: Synthetic peptide
LGSNRAS

SEQ ID NO: 1366 - protein, 7 aa, Artificial Sequence
  Description of Artificial Sequence: Synthetic peptide
GASTRAS

SEQ ID NO: 1367 - protein, 7 aa, Artificial Sequence
  Description of Artificial Sequence: Synthetic peptide
GASIRAT

SEQ ID NO: 1368 - protein, 7 aa, Artificial Sequence
  Description of Artificial Sequence: Synthetic peptide
DASNRAT

SEQ ID NO: 1369 - protein, 7 aa, Artificial Sequence
  Description of Artificial Sequence: Synthetic peptide
AASSLQS

SEQ ID NO: 1370 - protein, 7 aa, Artificial Sequence
  Description of Artificial Sequence: Synthetic peptide
EVSNRDS

SEQ ID NO: 1371 - protein, 7 aa, Artificial Sequence
  Description of Artificial Sequence: Synthetic peptide
DASTLQT

SEQ ID NO: 1372 - protein, 7 aa, Artificial Sequence
  Description of Artificial Sequence: Synthetic peptide
GASTRAT

SEQ ID NO: 1373 - protein, 7 aa, Artificial Sequence
  Description of Artificial Sequence: Synthetic peptide
GASSRAS

SEQ ID NO: 1374 - protein, 7 aa, Artificial Sequence
  Description of Artificial Sequence: Synthetic peptide
SATSPVP

SEQ ID NO: 1375 - protein, 7 aa, Artificial Sequence
  Description of Artificial Sequence: Synthetic peptide
AANKSQS

SEQ ID NO: 1376 - protein, 7 aa, Artificial Sequence
  Description of Artificial Sequence: Synthetic peptide
LGSNRAS

SEQ ID NO: 1377 - protein, 7 aa, Artificial Sequence
  Description of Artificial Sequence: Synthetic peptide
DDSVRPS

SEQ ID NO: 1378 - protein, 7 aa, Artificial Sequence
  Description of Artificial Sequence: Synthetic peptide
RDKERPS

SEQ ID NO: 1379 - protein, 7 aa, Artificial Sequence
  Description of Artificial Sequence: Synthetic peptide
AASNLQS

SEQ ID NO: 1380 - protein, 7 aa, Artificial Sequence
  Description of Artificial Sequence: Synthetic peptide
GKNNRPS

SEQ ID NO: 1381 - protein, 7 aa, Artificial Sequence
  Description of Artificial Sequence: Synthetic peptide
GTNNRPS

SEQ ID NO: 1382 - protein, 7 aa, Artificial Sequence
  Description of Artificial Sequence: Synthetic peptide
GASTRAT

SEQ ID NO: 1383 - protein, 7 aa, Artificial Sequence
  Description of Artificial Sequence: Synthetic peptide
DASSRAT

SEQ ID NO: 1384 - protein, 7 aa, Artificial Sequence
  Description of Artificial Sequence: Synthetic peptide
GASSRAT

SEQ ID NO: 1385 - protein, 7 aa, Artificial Sequence
  Description of Artificial Sequence: Synthetic peptide
GSSNRAT

SEQ ID NO: 1386 - protein, 7 aa, Artificial Sequence
  Description of Artificial Sequence: Synthetic peptide
AASSLQS

SEQ ID NO: 1387 - protein, 7 aa, Artificial Sequence
  Description of Artificial Sequence: Synthetic peptide
GASQRAT

SEQ ID NO: 1388 - protein, 7 aa, Artificial Sequence
  Description of Artificial Sequence: Synthetic peptide
GASSRAT

SEQ ID NO: 1389 - protein, 7 aa, Artificial Sequence
  Description of Artificial Sequence: Synthetic peptide
GASSRAT

SEQ ID NO: 1390 - protein, 7 aa, Artificial Sequence
  Description of Artificial Sequence: Synthetic peptide
GASSRAT

SEQ ID NO: 1391 - protein, 7 aa, Artificial Sequence
  Description of Artificial Sequence: Synthetic peptide
GASNWAT

SEQ ID NO: 1392 - protein, 7 aa, Artificial Sequence
  Description of Artificial Sequence: Synthetic peptide
LGSNRAS

SEQ ID NO: 1393 - protein, 7 aa, Artificial Sequence
  Description of Artificial Sequence: Synthetic peptide
GTSSRAT

SEQ ID NO: 1394 - protein, 7 aa, Artificial Sequence
  Description of Artificial Sequence: Synthetic peptide
GASGRAT

SEQ ID NO: 1395 - protein, 7 aa, Artificial Sequence
  Description of Artificial Sequence: Synthetic peptide
SASYRYT

SEQ ID NO: 1396 - protein, 7 aa, Artificial Sequence
  Description of Artificial Sequence: Synthetic peptide
LASNLET

SEQ ID NO: 1397 - protein, 7 aa, Artificial Sequence
  Description of Artificial Sequence: Synthetic peptide
LASNVQT

SEQ ID NO: 1398 - protein, 7 aa, Artificial Sequence
  Description of Artificial Sequence: Synthetic peptide
LASNVQT

SEQ ID NO: 1399 - protein, 9 aa, Artificial Sequence
  Description of Artificial Sequence: Synthetic peptide
QQSYSTPYT

SEQ ID NO: 1400 - protein, 10 aa, Artificial Sequence
  Description of Artificial Sequence: Synthetic peptide
QQYHSSPSWT

SEQ ID NO: 1401 - protein, 9 aa, Artificial Sequence
  Description of Artificial Sequence: Synthetic peptide
MQALQTPYT

SEQ ID NO: 1402 - protein, 8 aa, Artificial Sequence
  Description of Artificial Sequence: Synthetic peptide
MQNIQFPS

SEQ ID NO: 1403 - protein, 9 aa, Artificial Sequence
  Description of Artificial Sequence: Synthetic peptide
MQALQTPYT

SEQ ID NO: 1404 - protein, 8 aa, Artificial Sequence
  Description of Artificial Sequence: Synthetic peptide
QQSYKRAS

SEQ ID NO: 1405 - protein, 9 aa, Artificial Sequence
  Description of Artificial Sequence: Synthetic peptide
MQGRQFPYS

SEQ ID NO: 1406 - protein, 8 aa, Artificial Sequence
  Description of Artificial Sequence: Synthetic peptide
QQYGSSLT

SEQ ID NO: 1407 - protein, 9 aa, Artificial Sequence
  Description of Artificial Sequence: Synthetic peptide
QQYGSSSWT

SEQ ID NO: 1408 - protein, 10 aa, Artificial Sequence
  Description of Artificial Sequence: Synthetic peptide
QQYGSSPPWT

SEQ ID NO: 1409 - protein, 7 aa, Artificial Sequence
  Description of Artificial Sequence: Synthetic peptide
QQSYTLA

SEQ ID NO: 1410 - protein, 9 aa, Artificial Sequence
  Description of Artificial Sequence: Synthetic peptide
MQGTHWPGT

SEQ ID NO: 1411 - protein, 9 aa, Artificial Sequence
  Description of Artificial Sequence: Synthetic peptide
QQYESLPLT

SEQ ID NO: 1412 - protein, 10 aa, Artificial Sequence
  Description of Artificial Sequence: Synthetic peptide
QQYNDWLPVT

SEQ ID NO: 1413 - protein, 10 aa, Artificial Sequence
  Description of Artificial Sequence: Synthetic peptide
QQYAGSPPFT

SEQ ID NO: 1414 - protein, 9 aa, Artificial Sequence
  Description of Artificial Sequence: Synthetic peptide
LQHDNFPLT

SEQ ID NO: 1415 - protein, 9 aa, Artificial Sequence
  Description of Artificial Sequence: Synthetic peptide
QHYYRFPYS

SEQ ID NO: 1416 - protein, 9 aa, Artificial Sequence
  Description of Artificial Sequence: Synthetic peptide
MQALQTPYT

SEQ ID NO: 1417 - protein, 11 aa, Artificial Sequence
  Description of Artificial Sequence: Synthetic peptide
QVWDSDSEHVV

SEQ ID NO: 1418 - protein, 9 aa, Artificial Sequence
  Description of Artificial Sequence: Synthetic peptide
QAWDDTTVV

SEQ ID NO: 1419 - protein, 9 aa, Artificial Sequence
  Description of Artificial Sequence: Synthetic peptide
QKYNSAPFT

SEQ ID NO: 1420 - protein, 12 aa, Artificial Sequence
  Description of Artificial Sequence: Synthetic peptide
SSRDSSGDHLRV

SEQ ID NO: 1421 - protein, 11 aa, Artificial Sequence
  Description of Artificial Sequence: Synthetic peptide
NSRDSSGHHLL

SEQ ID NO: 1422 - protein, 14 aa, Artificial Sequence
  Description of Artificial Sequence: Synthetic peptide
QHYGSSFNGSSLFT

SEQ ID NO: 1423 - protein, 10 aa, Artificial Sequence
  Description of Artificial Sequence: Synthetic peptide
QQFGTSSGLT

SEQ ID NO: 1424 - protein, 10 aa, Artificial Sequence
  Description of Artificial Sequence: Synthetic peptide
QQYHSSPSWT

SEQ ID NO: 1425 - protein, 10 aa, Artificial Sequence
  Description of Artificial Sequence: Synthetic peptide
QQYHSSPSWT

SEQ ID NO: 1426 - protein, 9 aa, Artificial Sequence
  Description of Artificial Sequence: Synthetic peptide
QQSYSTPYS

SEQ ID NO: 1427 - protein, 10 aa, Artificial Sequence
  Description of Artificial Sequence: Synthetic peptide
QHYESSPSWT

SEQ ID NO: 1428 - protein, 10 aa, Artificial Sequence
  Description of Artificial Sequence: Synthetic peptide
QQYGSPPRFT

SEQ ID NO: 1429 - protein, 10 aa, Artificial Sequence
  Description of Artificial Sequence: Synthetic peptide
QHYGSSPSWT

SEQ ID NO: 1430 - protein, 10 aa, Artificial Sequence
  Description of Artificial Sequence: Synthetic peptide
QHYDSSPSWT

SEQ ID NO: 1431 - protein, 10 aa, Artificial Sequence
  Description of Artificial Sequence: Synthetic peptide
QYYGTSPMYT

SEQ ID NO: 1432 - protein, 9 aa, Artificial Sequence
  Description of Artificial Sequence: Synthetic peptide
MQALQTPLT

SEQ ID NO: 1433 - protein, 11 aa, Artificial Sequence
  Description of Artificial Sequence: Synthetic peptide
QHYGNSPPKFT

SEQ ID NO: 1434 - protein, 10 aa, Artificial Sequence
  Description of Artificial Sequence: Synthetic peptide
QHYGGSPRLT

SEQ ID NO: 1435 - protein, 9 aa, Artificial Sequence
  Description of Artificial Sequence: Synthetic peptide
QQHYSTPWT

SEQ ID NO: 1436 - protein, 9 aa, Artificial Sequence
  Description of Artificial Sequence: Synthetic peptide
LQSRIFPRT

SEQ ID NO: 1437 - protein, 9 aa, Artificial Sequence
  Description of Artificial Sequence: Synthetic peptide
LQSRTIPRT

SEQ ID NO: 1438 - protein, 9 aa, Artificial Sequence
  Description of Artificial Sequence: Synthetic peptide
LQSRTIPRT

SEQ ID NO: 1439 - protein, 7 aa, Artificial Sequence
  Description of Artificial Sequence: Synthetic peptide
GFALSNH

SEQ ID NO: 1440 - protein, 7 aa, Artificial Sequence
  Description of Artificial Sequence: Synthetic peptide
GFTFSNY

SEQ ID NO: 1441 - protein, 7 aa, Artificial Sequence
  Description of Artificial Sequence: Synthetic peptide
GFTFDDY

SEQ ID NO: 1442 - protein, 7 aa, Artificial Sequence
  Description of Artificial Sequence: Synthetic peptide
GFALSNH

SEQ ID NO: 1443 - protein, 7 aa, Artificial Sequence
  Description of Artificial Sequence: Synthetic peptide
GYIFDNF

SEQ ID NO: 1444 - protein, 7 aa, Artificial Sequence
  Description of Artificial Sequence: Synthetic peptide
GFTFSSD

SEQ ID NO: 1445 - protein, 7 aa, Artificial Sequence
  Description of Artificial Sequence: Synthetic peptide
GYTFSNY

SEQ ID NO: 1446 - protein, 7 aa, Artificial Sequence
  Description of Artificial Sequence: Synthetic peptide
GFALSNH

SEQ ID NO: 1447 - protein, 7 aa, Artificial Sequence
  Description of Artificial Sequence: Synthetic peptide
GFALSNH

SEQ ID NO: 1448 - protein, 7 aa, Artificial Sequence
  Description of Artificial Sequence: Synthetic peptide
GFALSNH

SEQ ID NO: 1449 - protein, 7 aa, Artificial Sequence
  Description of Artificial Sequence: Synthetic peptide
GFTFSDY

SEQ ID NO: 1450 - protein, 7 aa, Artificial Sequence
  Description of Artificial Sequence: Synthetic peptide
GFTFSDY

SEQ ID NO: 1451 - protein, 7 aa, Artificial Sequence
  Description of Artificial Sequence: Synthetic peptide
GFALSNH

SEQ ID NO: 1452 - protein, 7 aa, Artificial Sequence
  Description of Artificial Sequence: Synthetic peptide
GFALSNH

SEQ ID NO: 1453 - protein, 7 aa, Artificial Sequence
  Description of Artificial Sequence: Synthetic peptide
GFALSNH

SEQ ID NO: 1454 - protein, 9 aa, Artificial Sequence
  Description of Artificial Sequence: Synthetic peptide
GGSISSSYY

SEQ ID NO: 1455 - protein, 9 aa, Artificial Sequence
  Description of Artificial Sequence: Synthetic peptide
GFSLRTSGM

SEQ ID NO: 1456 - protein, 7 aa, Artificial Sequence
  Description of Artificial Sequence: Synthetic peptide
GFTFSSY

SEQ ID NO: 1457 - protein, 7 aa, Artificial Sequence
  Description of Artificial Sequence: Synthetic peptide
GFTFSDY

SEQ ID NO: 1458 - protein, 7 aa, Artificial Sequence
  Description of Artificial Sequence: Synthetic peptide
GYTVTSH

SEQ ID NO: 1459 - protein, 9 aa, Artificial Sequence
  Description of Artificial Sequence: Synthetic peptide
GGSISSGGY

SEQ ID NO: 1460 - protein, 7 aa, Artificial Sequence
  Description of Artificial Sequence: Synthetic peptide
GGTFSSY

SEQ ID NO: 1461 - protein, 9 aa, Artificial Sequence
  Description of Artificial Sequence: Synthetic peptide
GDSVSSNSA

SEQ ID NO: 1462 - protein, 7 aa, Artificial Sequence
  Description of Artificial Sequence: Synthetic peptide
GFTFSSY

SEQ ID NO: 1463 - protein, 7 aa, Artificial Sequence
  Description of Artificial Sequence: Synthetic peptide
GITFSRY

SEQ ID NO: 1464 - protein, 7 aa, Artificial Sequence
  Description of Artificial Sequence: Synthetic peptide
GFTFSSY

SEQ ID NO: 1465 - protein, 7 aa, Artificial Sequence
  Description of Artificial Sequence: Synthetic peptide
GFTFSSY

SEQ ID NO: 1466 - protein, 7 aa, Artificial Sequence
  Description of Artificial Sequence: Synthetic peptide
GFTFDDY

SEQ ID NO: 1467 - protein, 7 aa, Artificial Sequence
  Description of Artificial Sequence: Synthetic peptide
GFTFDDY

SEQ ID NO: 1468 - protein, 7 aa, Artificial Sequence
  Description of Artificial Sequence: Synthetic peptide
GFTFSSY

SEQ ID NO: 1469 - protein, 7 aa, Artificial Sequence
  Description of Artificial Sequence: Synthetic peptide
GFTFSSY

SEQ ID NO: 1470 - protein, 7 aa, Artificial Sequence
  Description of Artificial Sequence: Synthetic peptide
GFTFSSY

SEQ ID NO: 1471 - protein, 7 aa, Artificial Sequence
  Description of Artificial Sequence: Synthetic peptide
GFSFSSY

SEQ ID NO: 1472 - protein, 7 aa, Artificial Sequence
  Description of Artificial Sequence: Synthetic peptide
GFTFSSY

SEQ ID NO: 1473 - protein, 7 aa, Artificial Sequence
  Description of Artificial Sequence: Synthetic peptide
GFTFSSY

SEQ ID NO: 1474 - protein, 7 aa, Artificial Sequence
  Description of Artificial Sequence: Synthetic peptide
GFTFSSY

SEQ ID NO: 1475 - protein, 7 aa, Artificial Sequence
  Description of Artificial Sequence: Synthetic peptide
GYTFTNF

SEQ ID NO: 1476 - protein, 7 aa, Artificial Sequence
  Description of Artificial Sequence: Synthetic peptide
GYTFTDY

SEQ ID NO: 1477 - protein, 7 aa, Artificial Sequence
  Description of Artificial Sequence: Synthetic peptide
GYTFRHY

SEQ ID NO: 1478 - protein, 7 aa, Artificial Sequence
  Description of Artificial Sequence: Synthetic peptide
GYTFTHY

SEQ ID NO: 1479 - protein, 5 aa, Artificial Sequence
  Description of Artificial Sequence: Synthetic peptide
VYSGS

SEQ ID NO: 1480 - protein, 6 aa, Artificial Sequence
  Description of Artificial Sequence: Synthetic peptide
SRSGEN

SEQ ID NO: 1481 - protein, 6 aa, Artificial Sequence
  Description of Artificial Sequence: Synthetic peptide
SWNSGS

SEQ ID NO: 1482 - protein, 5 aa, Artificial Sequence
  Description of Artificial Sequence: Synthetic peptide
VYSGS

SEQ ID NO: 1483 - protein, 6 aa, Artificial Sequence
  Description of Artificial Sequence: Synthetic peptide
NPKNNN

SEQ ID NO: 1484 - protein, 6 aa, Artificial Sequence
  Description of Artificial Sequence: Synthetic peptide
SGSGGT

SEQ ID NO: 1485 - protein, 6 aa, Artificial Sequence
  Description of Artificial Sequence: Synthetic peptide
SAYNGN

SEQ ID NO: 1486 - protein, 5 aa, Artificial Sequence
  Description of Artificial Sequence: Synthetic peptide
VYSGS

SEQ ID NO: 1487 - protein, 5 aa, Artificial Sequence
  Description of Artificial Sequence: Synthetic peptide
VYSGS

SEQ ID NO: 1488 - protein, 5 aa, Artificial Sequence
  Description of Artificial Sequence: Synthetic peptide
VYSGS

SEQ ID NO: 1489 - protein, 6 aa, Artificial Sequence
  Description of Artificial Sequence: Synthetic peptide
SSSGST

SEQ ID NO: 1490 - protein, 6 aa, Artificial Sequence
  Description of Artificial Sequence: Synthetic peptide
SSSGNT

SEQ ID NO: 1491 - protein, 5 aa, Artificial Sequence
  Description of Artificial Sequence: Synthetic peptide
VYSGS

SEQ ID NO: 1492 - protein, 5 aa, Artificial Sequence
  Description of Artificial Sequence: Synthetic peptide
VYSGS

SEQ ID NO: 1493 - protein, 5 aa, Artificial Sequence
  Description of Artificial Sequence: Synthetic peptide
VYSGS

SEQ ID NO: 1494 - protein, 5 aa, Artificial Sequence
  Description of Artificial Sequence: Synthetic peptide
YYSGS

SEQ ID NO: 1495 - protein, 5 aa, Artificial Sequence
  Description of Artificial Sequence: Synthetic peptide
DWDED

SEQ ID NO: 1496 - protein, 6 aa, Artificial Sequence
  Description of Artificial Sequence: Synthetic peptide
SSSSSY

SEQ ID NO: 1497 - protein, 6 aa, Artificial Sequence
  Description of Artificial Sequence: Synthetic peptide
SSSGST

SEQ ID NO: 1498 - protein, 6 aa, Artificial Sequence
  Description of Artificial Sequence: Synthetic peptide
NPSGGV

SEQ ID NO: 1499 - protein, 5 aa, Artificial Sequence
  Description of Artificial Sequence: Synthetic peptide
YYSGS

SEQ ID NO: 1500 - protein, 6 aa, Artificial Sequence
  Description of Artificial Sequence: Synthetic peptide
IPIFGT

SEQ ID NO: 1501 - protein, 7 aa, Artificial Sequence
  Description of Artificial Sequence: Synthetic peptide
YYRSKWY

SEQ ID NO: 1502 - protein, 6 aa, Artificial Sequence
  Description of Artificial Sequence: Synthetic peptide
SGSGGS

SEQ ID NO: 1503 - protein, 6 aa, Artificial Sequence
  Description of Artificial Sequence: Synthetic peptide
SDSGVS

SEQ ID NO: 1504 - protein, 6 aa, Artificial Sequence
  Description of Artificial Sequence: Synthetic peptide
SGSGGS

SEQ ID NO: 1505 - protein, 6 aa, Artificial Sequence
  Description of Artificial Sequence: Synthetic peptide
SGSGGS

SEQ ID NO: 1506 - protein, 6 aa, Artificial Sequence
  Description of Artificial Sequence: Synthetic peptide
SWNSGS

SEQ ID NO: 1507 - protein, 6 aa, Artificial Sequence
  Description of Artificial Sequence: Synthetic peptide
NWKGNS

SEQ ID NO: 1508 - protein, 6 aa, Artificial Sequence
  Description of Artificial Sequence: Synthetic peptide
SGSGGS

SEQ ID NO: 1509 - protein, 6 aa, Artificial Sequence
  Description of Artificial Sequence: Synthetic peptide
SGSGGS

SEQ ID NO: 1510 - protein, 6 aa, Artificial Sequence
  Description of Artificial Sequence: Synthetic peptide
SGSGGS

SEQ ID NO: 1511 - protein, 6 aa, Artificial Sequence
  Description of Artificial Sequence: Synthetic peptide
SGSGGS

SEQ ID NO: 1512 - protein, 6 aa, Artificial Sequence
  Description of Artificial Sequence: Synthetic peptide
SGSGGS

SEQ ID NO: 1513 - protein, 6 aa, Artificial Sequence
  Description of Artificial Sequence: Synthetic peptide
SGSGGS

SEQ ID NO: 1514 - protein, 6 aa, Artificial Sequence
  Description of Artificial Sequence: Synthetic peptide
SGSGGS

SEQ ID NO: 1515 - protein, 6 aa, Artificial Sequence
  Description of Artificial Sequence: Synthetic peptide
NTYTGE

SEQ ID NO: 1516 - protein, 6 aa, Artificial Sequence
  Description of Artificial Sequence: Synthetic peptide
NTETRE

SEQ ID NO: 1517 - protein, 6 aa, Artificial Sequence
  Description of Artificial Sequence: Synthetic peptide
NTESGV

SEQ ID NO: 1518 - protein, 6 aa, Artificial Sequence
  Description of Artificial Sequence: Synthetic peptide
NTETGE

SEQ ID NO: 1519 - protein, 7 aa, Artificial Sequence
  Description of Artificial Sequence: Synthetic peptide
HGGESDV

SEQ ID NO: 1520 - protein, 11 aa, Artificial Sequence
  Description of Artificial Sequence: Synthetic peptide
SPAHYYGGMDV

SEQ ID NO: 1521 - protein, 6 aa, Artificial Sequence
  Description of Artificial Sequence: Synthetic peptide
HSFLAY

SEQ ID NO: 1522 - protein, 7 aa, Artificial Sequence
  Description of Artificial Sequence: Synthetic peptide
HGGESDV

SEQ ID NO: 1523 - protein, 11 aa, Artificial Sequence
  Description of Artificial Sequence: Synthetic peptide
GPYYYQSYMDV

SEQ ID NO: 1524 - protein, 14 aa, Artificial Sequence
  Description of Artificial Sequence: Synthetic peptide
LDSSGYYYARGPRY

SEQ ID NO: 1525 - protein, 9 aa, Artificial Sequence
  Description of Artificial Sequence: Synthetic peptide
GPYYYYMDV

SEQ ID NO: 1526 - protein, 7 aa, Artificial Sequence
  Description of Artificial Sequence: Synthetic peptide
HGGESDV

SEQ ID NO: 1527 - protein, 7 aa, Artificial Sequence
  Description of Artificial Sequence: Synthetic peptide
HGGESDV

SEQ ID NO: 1528 - protein, 7 aa, Artificial Sequence
  Description of Artificial Sequence: Synthetic peptide
HGGESDV

SEQ ID NO: 1529 - protein, 8 aa, Artificial Sequence
  Description of Artificial Sequence: Synthetic peptide
ESGDGMDV

SEQ ID NO: 1530 - protein, 8 aa, Artificial Sequence
  Description of Artificial Sequence: Synthetic peptide
STMVREDY

SEQ ID NO: 1531 - protein, 7 aa, Artificial Sequence
  Description of Artificial Sequence: Synthetic peptide
HGGESDV

SEQ ID NO: 1532 - protein, 7 aa, Artificial Sequence
  Description of Artificial Sequence: Synthetic peptide
HGGESDV

SEQ ID NO: 1533 - protein, 7 aa, Artificial Sequence
  Description of Artificial Sequence: Synthetic peptide
HGGESDV

SEQ ID NO: 1534 - protein, 11 aa, Artificial Sequence
  Description of Artificial Sequence: Synthetic peptide
HWQEWPDAFDI

SEQ ID NO: 1535 - protein, 13 aa, Artificial Sequence
  Description of Artificial Sequence: Synthetic peptide
SGAGGTSATAFDI

SEQ ID NO: 1536 - protein, 10 aa, Artificial Sequence
  Description of Artificial Sequence: Synthetic peptide
TIAAVYAFDI

SEQ ID NO: 1537 - protein, 8 aa, Artificial Sequence
  Description of Artificial Sequence: Synthetic peptide
DLRGAFDI

SEQ ID NO: 1538 - protein, 11 aa, Artificial Sequence
  Description of Artificial Sequence: Synthetic peptide
EGSGSGWYFDF

SEQ ID NO: 1539 - protein, 13 aa, Artificial Sequence
  Description of Artificial Sequence: Synthetic peptide
AGIAARLRGAFDI

SEQ ID NO: 1540 - protein, 20 aa, Artificial Sequence
  Description of Artificial Sequence: Synthetic peptide
RGGYQLLRWDVGLLRSAFDI

SEQ ID NO: 1541 - protein, 13 aa, Artificial Sequence
  Description of Artificial Sequence: Synthetic peptide
SSPEGLFLYWFDP

SEQ ID NO: 1542 - protein, 9 aa, Artificial Sequence
  Description of Artificial Sequence: Synthetic peptide
VEGSGSLDY

SEQ ID NO: 1543 - protein, 9 aa, Artificial Sequence
  Description of Artificial Sequence: Synthetic peptide
RAGSEASDI

SEQ ID NO: 1544 - protein, 15 aa, Artificial Sequence
  Description of Artificial Sequence: Synthetic peptide
ATYKRELRYYYGMDV

SEQ ID NO: 1545 - protein, 15 aa, Artificial Sequence
  Description of Artificial Sequence: Synthetic peptide
ATYKRELRYYYGMDV

SEQ ID NO: 1546 - protein, 8 aa, Artificial Sequence
  Description of Artificial Sequence: Synthetic peptide
VGKAVPDV

SEQ ID NO: 1547 - protein, 13 aa, Artificial Sequence
  Description of Artificial Sequence: Synthetic peptide
HQGVAYYNYAMDV

SEQ ID NO: 1548 - protein, 8 aa, Artificial Sequence
  Description of Artificial Sequence: Synthetic peptide
VVRDGMDV

SEQ ID NO: 1549 - protein, 9 aa, Artificial Sequence
  Description of Artificial Sequence: Synthetic peptide
IPQTGTFDY

SEQ ID NO: 1550 - protein, 15 aa, Artificial Sequence
  Description of Artificial Sequence: Synthetic peptide
ANYKRELRYYYGMDV

SEQ ID NO: 1551 - protein, 11 aa, Artificial Sequence
  Description of Artificial Sequence: Synthetic peptide
ALVGATGAFDI

SEQ ID NO: 1552 - protein, 8 aa, Artificial Sequence
  Description of Artificial Sequence: Synthetic peptide
WFGEGFDP

SEQ ID NO: 1553 - protein, 17 aa, Artificial Sequence
  Description of Artificial Sequence: Synthetic peptide
VGYDSSGYYRDYYGMDV

SEQ ID NO: 1554 - protein, 13 aa, Artificial Sequence
  Description of Artificial Sequence: Synthetic peptide
MGWSSGYLGAFDI

SEQ ID NO: 1555 - protein, 13 aa, Artificial Sequence
  Description of Artificial Sequence: Synthetic peptide
GEIYYGYDGGFAY

SEQ ID NO: 1556 - protein, 8 aa, Artificial Sequence
  Description of Artificial Sequence: Synthetic peptide
DYSYAMDY

SEQ ID NO: 1557 - protein, 8 aa, Artificial Sequence
  Description of Artificial Sequence: Synthetic peptide
DYLYSLDF

SEQ ID NO: 1558 - protein, 8 aa, Artificial Sequence
  Description of Artificial Sequence: Synthetic peptide
DYLYSCDY

SEQ ID NO: 1559 - protein, 7 aa, Artificial Sequence
  Description of Artificial Sequence: Synthetic peptide
SQSISSY

SEQ ID NO: 1560 - protein, 8 aa, Artificial Sequence
  Description of Artificial Sequence: Synthetic peptide
SQSISSSF

SEQ ID NO: 1561 - protein, 12 aa, Artificial Sequence
  Description of Artificial Sequence: Synthetic peptide
SQSLLHSNGYNY

SEQ ID NO: 1562 - protein, 12 aa, Artificial Sequence
  Description of Artificial Sequence: Synthetic peptide
SQSLLRNDGKTP

SEQ ID NO: 1563 - protein, 12 aa, Artificial Sequence
  Description of Artificial Sequence: Synthetic peptide
SQSLLHSNGYNY

SEQ ID NO: 1564 - protein, 7 aa, Artificial Sequence
  Description of Artificial Sequence: Synthetic peptide
SQSISSY

SEQ ID NO: 1565 - protein, 12 aa, Artificial Sequence
  Description of Artificial Sequence: Synthetic peptide
SQSLLYSNGYNY

SEQ ID NO: 1566 - protein, 7 aa, Artificial Sequence
  Description of Artificial Sequence: Synthetic peptide
SQSVSSN

SEQ ID NO: 1567 - protein, 7 aa, Artificial Sequence
  Description of Artificial Sequence: Synthetic peptide
SQSVSSK

SEQ ID NO: 1568 - protein, 8 aa, Artificial Sequence
  Description of Artificial Sequence: Synthetic peptide
SQSVGSTN

SEQ ID NO: 1569 - protein, 7 aa, Artificial Sequence
  Description of Artificial Sequence: Synthetic peptide
SQSISSY

SEQ ID NO: 1570 - protein, 12 aa, Artificial Sequence
  Description of Artificial Sequence: Synthetic peptide
SESLVHNSGKTY

SEQ ID NO: 1571 - protein, 7 aa, Artificial Sequence
  Description of Artificial Sequence: Synthetic peptide
SEDINKF

SEQ ID NO: 1572 - protein, 7 aa, Artificial Sequence
  Description of Artificial Sequence: Synthetic peptide
SQSVGSN

SEQ ID NO: 1573 - protein, 8 aa, Artificial Sequence
  Description of Artificial Sequence: Synthetic peptide
SQSIGSSS

SEQ ID NO: 1574 - protein, 7 aa, Artificial Sequence
  Description of Artificial Sequence: Synthetic peptide
SQDIDDA

SEQ ID NO: 1575 - protein, 7 aa, Artificial Sequence
  Description of Artificial Sequence: Synthetic peptide
SQDIYNN

SEQ ID NO: 1576 - protein, 12 aa, Artificial Sequence
  Description of Artificial Sequence: Synthetic peptide
SQSLLHSNGYNY

SEQ ID NO: 1577 - protein, 7 aa, Artificial Sequence
  Description of Artificial Sequence: Synthetic peptide
NNIGTKS

SEQ ID NO: 1578 - protein, 7 aa, Artificial Sequence
  Description of Artificial Sequence: Synthetic peptide
DGLSKKY

SEQ ID NO: 1579 - protein, 7 aa, Artificial Sequence
  Description of Artificial Sequence: Synthetic peptide
SQGIRNW

SEQ ID NO: 1580 - protein, 7 aa, Artificial Sequence
  Description of Artificial Sequence: Synthetic peptide
NNIGSKS

SEQ ID NO: 1581 - protein, 7 aa, Artificial Sequence
  Description of Artificial Sequence: Synthetic peptide
DSLGNYY

SEQ ID NO: 1582 - protein, 8 aa, Artificial Sequence
  Description of Artificial Sequence: Synthetic peptide
SQSVSSAY

SEQ ID NO: 1583 - protein, 7 aa, Artificial Sequence
  Description of Artificial Sequence: Synthetic peptide
SQSVSNS

SEQ ID NO: 1584 - protein, 8 aa, Artificial Sequence
  Description of Artificial Sequence: Synthetic peptide
SQSVSSSF

SEQ ID NO: 1585 - protein, 8 aa, Artificial Sequence
  Description of Artificial Sequence: Synthetic peptide
SQSVSTTF

SEQ ID NO: 1586 - protein, 7 aa, Artificial Sequence
  Description of Artificial Sequence: Synthetic peptide
SQSISSY

SEQ ID NO: 1587 - protein, 8 aa, Artificial Sequence
  Description of Artificial Sequence: Synthetic peptide
TQSIGSSF

SEQ ID NO: 1588 - protein, 8 aa, Artificial Sequence
  Description of Artificial Sequence: Synthetic peptide
SQSVSSSY

SEQ ID NO: 1589 - protein, 8 aa, Artificial Sequence
  Description of Artificial Sequence: Synthetic peptide
SQSVSSSY

SEQ ID NO: 1590 - protein, 8 aa, Artificial Sequence
  Description of Artificial Sequence: Synthetic peptide
SQRVASNY

SEQ ID NO: 1591 - protein, 8 aa, Artificial Sequence
  Description of Artificial Sequence: Synthetic peptide
SQSLSSNF

SEQ ID NO: 1592 - protein, 12 aa, Artificial Sequence
  Description of Artificial Sequence: Synthetic peptide
SQSLLHSNGYNY

SEQ ID NO: 1593 - protein, 8 aa, Artificial Sequence
  Description of Artificial Sequence: Synthetic peptide
SQSVSSSY

SEQ ID NO: 1594 - protein, 8 aa, Artificial Sequence
  Description of Artificial Sequence: Synthetic peptide
SQSVASSF

SEQ ID NO: 1595 - protein, 7 aa, Artificial Sequence
  Description of Artificial Sequence: Synthetic peptide
SQDVNTA

SEQ ID NO: 1596 - protein, 11 aa, Artificial Sequence
  Description of Artificial Sequence: Synthetic peptide
SESVSVIGAHL

SEQ ID NO: 1597 - protein, 11 aa, Artificial Sequence
  Description of Artificial Sequence: Synthetic peptide
SESVTILGSHL

SEQ ID NO: 1598 - protein, 11 aa, Artificial Sequence
  Description of Artificial Sequence: Synthetic peptide
SESVTILGSHL

SEQ ID NO: 1599 - protein, 3 aa, Artificial Sequence
  Description of Artificial Sequence: Synthetic peptide
AAS

SEQ ID NO: 1600 - protein, 3 aa, Artificial Sequence
  Description of Artificial Sequence: Synthetic peptide
GAS

SEQ ID NO: 1601 - protein, 3 aa, Artificial Sequence
  Description of Artificial Sequence: Synthetic peptide
LGS

SEQ ID NO: 1602 - protein, 3 aa, Artificial Sequence
  Description of Artificial Sequence: Synthetic peptide
EVS

SEQ ID NO: 1603 - protein, 3 aa, Artificial Sequence
  Description of Artificial Sequence: Synthetic peptide
LGS

SEQ ID NO: 1604 - protein, 3 aa, Artificial Sequence
  Description of Artificial Sequence: Synthetic peptide
GAS

SEQ ID NO: 1605 - protein, 3 aa, Artificial Sequence
  Description of Artificial Sequence: Synthetic peptide
LGS

SEQ ID NO: 1606 - protein, 3 aa, Artificial Sequence
  Description of Artificial Sequence: Synthetic peptide
GAS

SEQ ID NO: 1607 - protein, 3 aa, Artificial Sequence
  Description of Artificial Sequence: Synthetic peptide
GAS

SEQ ID NO: 1608 - protein, 3 aa, Artificial Sequence
  Description of Artificial Sequence: Synthetic peptide
DAS

SEQ ID NO: 1609 - protein, 3 aa, Artificial Sequence
  Description of Artificial Sequence: Synthetic peptide
AAS

SEQ ID NO: 1610 - protein, 3 aa, Artificial Sequence
  Description of Artificial Sequence: Synthetic peptide
EVS

SEQ ID NO: 1611 - protein, 3 aa, Artificial Sequence
  Description of Artificial Sequence: Synthetic peptide
DAS

SEQ ID NO: 1612 - protein, 3 aa, Artificial Sequence
  Description of Artificial Sequence: Synthetic peptide
GAS

SEQ ID NO: 1613 - protein, 3 aa, Artificial Sequence
  Description of Artificial Sequence: Synthetic peptide
GAS

SEQ ID NO: 1614 - protein, 3 aa, Artificial Sequence
  Description of Artificial Sequence: Synthetic peptide
SAT

SEQ ID NO: 1615 - protein, 3 aa, Artificial Sequence
  Description of Artificial Sequence: Synthetic peptide
AAN

SEQ ID NO: 1616 - protein, 3 aa, Artificial Sequence
  Description of Artificial Sequence: Synthetic peptide
LGS

SEQ ID NO: 1617 - protein, 3 aa, Artificial Sequence
  Description of Artificial Sequence: Synthetic peptide
DDS

SEQ ID NO: 1618 - protein, 3 aa, Artificial Sequence
  Description of Artificial Sequence: Synthetic peptide
RDK

SEQ ID NO: 1619 - protein, 3 aa, Artificial Sequence
  Description of Artificial Sequence: Synthetic peptide
AAS

SEQ ID NO: 1620 - protein, 3 aa, Artificial Sequence
  Description of Artificial Sequence: Synthetic peptide
GKN

SEQ ID NO: 1621 - protein, 3 aa, Artificial Sequence
  Description of Artificial Sequence: Synthetic peptide
GTN

SEQ ID NO: 1622 - protein, 3 aa, Artificial Sequence
  Description of Artificial Sequence: Synthetic peptide
GAS

SEQ ID NO: 1623 - protein, 3 aa, Artificial Sequence
  Description of Artificial Sequence: Synthetic peptide
DAS

SEQ ID NO: 1624 - protein, 3 aa, Artificial Sequence
  Description of Artificial Sequence: Synthetic peptide
GAS

SEQ ID NO: 1625 - protein, 3 aa, Artificial Sequence
  Description of Artificial Sequence: Synthetic peptide
GSS

SEQ ID NO: 1626 - protein, 3 aa, Artificial Sequence
  Description of Artificial Sequence: Synthetic peptide
AAS

SEQ ID NO: 1627 - protein, 3 aa, Artificial Sequence
  Description of Artificial Sequence: Synthetic peptide
GAS

SEQ ID NO: 1628 - protein, 3 aa, Artificial Sequence
  Description of Artificial Sequence: Synthetic peptide
GAS

SEQ ID NO: 1629 - protein, 3 aa, Artificial Sequence
  Description of Artificial Sequence: Synthetic peptide
GAS

SEQ ID NO: 1630 - protein, 3 aa, Artificial Sequence
  Description of Artificial Sequence: Synthetic peptide
GAS

SEQ ID NO: 1631 - protein, 3 aa, Artificial Sequence
  Description of Artificial Sequence: Synthetic peptide
GAS

SEQ ID NO: 1632 - protein, 3 aa, Artificial Sequence
  Description of Artificial Sequence: Synthetic peptide
LGS

SEQ ID NO: 1633 - protein, 3 aa, Artificial Sequence
  Description of Artificial Sequence: Synthetic peptide
GTS

SEQ ID NO: 1634 - protein, 3 aa, Artificial Sequence
  Description of Artificial Sequence: Synthetic peptide
GAS

SEQ ID NO: 1635 - protein, 3 aa, Artificial Sequence
  Description of Artificial Sequence: Synthetic peptide
SAS

SEQ ID NO: 1636 - protein, 3 aa, Artificial Sequence
  Description of Artificial Sequence: Synthetic peptide
LAS

SEQ ID NO: 1637 - protein, 3 aa, Artificial Sequence
  Description of Artificial Sequence: Synthetic peptide
LAS

SEQ ID NO: 1638 - protein, 3 aa, Artificial Sequence
  Description of Artificial Sequence: Synthetic peptide
LAS

SEQ ID NO: 1639 - protein, 6 aa, Artificial Sequence
  Description of Artificial Sequence: Synthetic peptide
SYSTPY

SEQ ID NO: 1640 - protein, 7 aa, Artificial Sequence
  Description of Artificial Sequence: Synthetic peptide
YHSSPSW

SEQ ID NO: 1641 - protein, 6 aa, Artificial Sequence
  Description of Artificial Sequence: Synthetic peptide
ALQTPY

SEQ ID NO: 1642 - protein, 5 aa, Artificial Sequence
  Description of Artificial Sequence: Synthetic peptide
NIQFP

SEQ ID NO: 1643 - protein, 6 aa, Artificial Sequence
  Description of Artificial Sequence: Synthetic peptide
ALQTPY

SEQ ID NO: 1644 - protein, 5 aa, Artificial Sequence
  Description of Artificial Sequence: Synthetic peptide
SYKRA

SEQ ID NO: 1645 - protein, 6 aa, Artificial Sequence
  Description of Artificial Sequence: Synthetic peptide
GRQFPY

SEQ ID NO: 1646 - protein, 5 aa, Artificial Sequence
  Description of Artificial Sequence: Synthetic peptide
YGSSL

SEQ ID NO: 1647 - protein, 6 aa, Artificial Sequence
  Description of Artificial Sequence: Synthetic peptide
YGSSSW

SEQ ID NO: 1648 - protein, 7 aa, Artificial Sequence
  Description of Artificial Sequence: Synthetic peptide
YGSSPPW

SEQ ID NO: 1649 - protein, 4 aa, Artificial Sequence
  Description of Artificial Sequence: Synthetic peptide
SYTL

SEQ ID NO: 1650 - protein, 6 aa, Artificial Sequence
  Description of Artificial Sequence: Synthetic peptide
GTHWPG

SEQ ID NO: 1651 - protein, 6 aa, Artificial Sequence
  Description of Artificial Sequence: Synthetic peptide
YESLPL

SEQ ID NO: 1652 - protein, 7 aa, Artificial Sequence
  Description of Artificial Sequence: Synthetic peptide
YNDWLPV

SEQ ID NO: 1653 - protein, 7 aa, Artificial Sequence
  Description of Artificial Sequence: Synthetic peptide
YAGSPPF

SEQ ID NO: 1654 - protein, 6 aa, Artificial Sequence
  Description of Artificial Sequence: Synthetic peptide
HDNFPL

SEQ ID NO: 1655 - protein, 6 aa, Artificial Sequence
  Description of Artificial Sequence: Synthetic peptide
YYRFPY

SEQ ID NO: 1656 - protein, 6 aa, Artificial Sequence
  Description of Artificial Sequence: Synthetic peptide
ALQTPY

SEQ ID NO: 1657 - protein, 8 aa, Artificial Sequence
  Description of Artificial Sequence: Synthetic peptide
WDSDSEHV

SEQ ID NO: 1658 - protein, 6 aa, Artificial Sequence
  Description of Artificial Sequence: Synthetic peptide
WDDTTV

SEQ ID NO: 1659 - protein, 6 aa, Artificial Sequence
  Description of Artificial Sequence: Synthetic peptide
YNSAPF

SEQ ID NO: 1660 - protein, 9 aa, Artificial Sequence
  Description of Artificial Sequence: Synthetic peptide
RDSSGDHLR

SEQ ID NO: 1661 - protein, 8 aa, Artificial Sequence
  Description of Artificial Sequence: Synthetic peptide
RDSSGHHL

SEQ ID NO: 1662 - protein, 11 aa, Artificial Sequence
  Description of Artificial Sequence: Synthetic peptide
YGSSFNGSSLF

SEQ ID NO: 1663 - protein, 7 aa, Artificial Sequence
  Description of Artificial Sequence: Synthetic peptide
FGTSSGL

SEQ ID NO: 1664 - protein, 7 aa, Artificial Sequence
  Description of Artificial Sequence: Synthetic peptide
YHSSPSW

SEQ ID NO: 1665 - protein, 7 aa, Artificial Sequence
  Description of Artificial Sequence: Synthetic peptide
YHSSPSW

SEQ ID NO: 1666 - protein, 6 aa, Artificial Sequence
  Description of Artificial Sequence: Synthetic peptide
SYSTPY

SEQ ID NO: 1667 - protein, 7 aa, Artificial Sequence
  Description of Artificial Sequence: Synthetic peptide
YESSPSW

SEQ ID NO: 1668 - protein, 7 aa, Artificial Sequence
  Description of Artificial Sequence: Synthetic peptide
YGSPPRF

SEQ ID NO: 1669 - protein, 7 aa, Artificial Sequence
  Description of Artificial Sequence: Synthetic peptide
YGSSPSW

SEQ ID NO: 1670 - protein, 7 aa, Artificial Sequence
  Description of Artificial Sequence: Synthetic peptide
YDSSPSW

SEQ ID NO: 1671 - protein, 7 aa, Artificial Sequence
  Description of Artificial Sequence: Synthetic peptide
YGTSPMY

SEQ ID NO: 1672 - protein, 6 aa, Artificial Sequence
  Description of Artificial Sequence: Synthetic peptide
ALQTPL

SEQ ID NO: 1673 - protein, 8 aa, Artificial Sequence
  Description of Artificial Sequence: Synthetic peptide
YGNSPPKF

SEQ ID NO: 1674 - protein, 7 aa, Artificial Sequence
  Description of Artificial Sequence: Synthetic peptide
YGGSPRL

SEQ ID NO: 1675 - protein, 6 aa, Artificial Sequence
  Description of Artificial Sequence: Synthetic peptide
HYSTPW

SEQ ID NO: 1676 - protein, 6 aa, Artificial Sequence
  Description of Artificial Sequence: Synthetic peptide
SRIFPR

SEQ ID NO: 1677 - protein, 6 aa, Artificial Sequence
  Description of Artificial Sequence: Synthetic peptide
SRTIPR

SEQ ID NO: 1678 - protein, 6 aa, Artificial Sequence
  Description of Artificial Sequence: Synthetic peptide
SRTIPR

SEQ ID NO: 1679 - protein, 10 aa, Artificial Sequence
  Description of Artificial Sequence: Synthetic peptide
GFALSNHGMS

SEQ ID NO: 1680 - protein, 10 aa, Artificial Sequence
  Description of Artificial Sequence: Synthetic peptide
GFTFSNYAMS

SEQ ID NO: 1681 - protein, 10 aa, Artificial Sequence
  Description of Artificial Sequence: Synthetic peptide
GFTFDDYAMH

SEQ ID NO: 1682 - protein, 10 aa, Artificial Sequence
  Description of Artificial Sequence: Synthetic peptide
GFALSNHGMS

SEQ ID NO: 1683 - protein, 10 aa, Artificial Sequence
  Description of Artificial Sequence: Synthetic peptide
GYIFDNFGIN

SEQ ID NO: 1684 - protein, 10 aa, Artificial Sequence
  Description of Artificial Sequence: Synthetic peptide
GFTFSSDAMT

SEQ ID NO: 1685 - protein, 10 aa, Artificial Sequence
  Description of Artificial Sequence: Synthetic peptide
GYTFSNYGIT

SEQ ID NO: 1686 - protein, 10 aa, Artificial Sequence
  Description of Artificial Sequence: Synthetic peptide
GFALSNHGMS

SEQ ID NO: 1687 - protein, 10 aa, Artificial Sequence
  Description of Artificial Sequence: Synthetic peptide
GFALSNHGMS

SEQ ID NO: 1688 - protein, 10 aa, Artificial Sequence
  Description of Artificial Sequence: Synthetic peptide
GFALSNHGMS

SEQ ID NO: 1689 - protein, 10 aa, Artificial Sequence
  Description of Artificial Sequence: Synthetic peptide
GFTFSDYYMS

SEQ ID NO: 1690 - protein, 10 aa, Artificial Sequence
  Description of Artificial Sequence: Synthetic peptide
GFTFSDYYMS

SEQ ID NO: 1691 - protein, 10 aa, Artificial Sequence
  Description of Artificial Sequence: Synthetic peptide
GFALSNHGMS

SEQ ID NO: 1692 - protein, 10 aa, Artificial Sequence
  Description of Artificial Sequence: Synthetic peptide
GFALSNHGMS

SEQ ID NO: 1693 - protein, 10 aa, Artificial Sequence
  Description of Artificial Sequence: Synthetic peptide
GFALSNHGMS

SEQ ID NO: 1694 - protein, 12 aa, Artificial Sequence
  Description of Artificial Sequence: Synthetic peptide
GGSISSSYYYWG

SEQ ID NO: 1695 - protein, 12 aa, Artificial Sequence
  Description of Artificial Sequence: Synthetic peptide
GFSLRTSGMCVS

SEQ ID NO: 1696 - protein, 10 aa, Artificial Sequence
  Description of Artificial Sequence: Synthetic peptide
GFTFSSYSMN

SEQ ID NO: 1697 - protein, 10 aa, Artificial Sequence
  Description of Artificial Sequence: Synthetic peptide
GFTFSDYYMS

SEQ ID NO: 1698 - protein, 10 aa, Artificial Sequence
  Description of Artificial Sequence: Synthetic peptide
GYTVTSHYIH

SEQ ID NO: 1699 - protein, 12 aa, Artificial Sequence
  Description of Artificial Sequence: Synthetic peptide
GGSISSGGYYWS

SEQ ID NO: 1700 - protein, 10 aa, Artificial Sequence
  Description of Artificial Sequence: Synthetic peptide
GGTFSSYAIS

SEQ ID NO: 1701 - protein, 12 aa, Artificial Sequence
  Description of Artificial Sequence: Synthetic peptide
GDSVSSNSAAWN

SEQ ID NO: 1702 - protein, 10 aa, Artificial Sequence
  Description of Artificial Sequence: Synthetic peptide
GFTFSSYAMS

SEQ ID NO: 1703 - protein, 10 aa, Artificial Sequence
  Description of Artificial Sequence: Synthetic peptide
GITFSRYPMS

SEQ ID NO: 1704 - protein, 10 aa, Artificial Sequence
  Description of Artificial Sequence: Synthetic peptide
GFTFSSYAMS

SEQ ID NO: 1705 - protein, 10 aa, Artificial Sequence
  Description of Artificial Sequence: Synthetic peptide
GFTFSSYAMS

SEQ ID NO: 1706 - protein, 10 aa, Artificial Sequence
  Description of Artificial Sequence: Synthetic peptide
GFTFDDYAMH

SEQ ID NO: 1707 - protein, 10 aa, Artificial Sequence
  Description of Artificial Sequence: Synthetic peptide
GFTFDDYAMH

SEQ ID NO: 1708 - protein, 10 aa, Artificial Sequence
  Description of Artificial Sequence: Synthetic peptide
GFTFSSYAMS

SEQ ID NO: 1709 - protein, 10 aa, Artificial Sequence
  Description of Artificial Sequence: Synthetic peptide
GFTFSSYAMS

SEQ ID NO: 1710 - protein, 10 aa, Artificial Sequence
  Description of Artificial Sequence: Synthetic peptide
GFTFSSYAMS

SEQ ID NO: 1711 - protein, 10 aa, Artificial Sequence
  Description of Artificial Sequence: Synthetic peptide
GFSFSSYAMS

SEQ ID NO: 1712 - protein, 10 aa, Artificial Sequence
  Description of Artificial Sequence: Synthetic peptide
GFTFSSYAMS

SEQ ID NO: 1713 - protein, 10 aa, Artificial Sequence
  Description of Artificial Sequence: Synthetic peptide
GFTFSSYAMS

SEQ ID NO: 1714 - protein, 10 aa, Artificial Sequence
  Description of Artificial Sequence: Synthetic peptide
GFTFSSYAMS

SEQ ID NO: 1715 - protein, 10 aa, Artificial Sequence
  Description of Artificial Sequence: Synthetic peptide
GYTFTNFGMN

SEQ ID NO: 1716 - protein, 10 aa, Artificial Sequence
  Description of Artificial Sequence: Synthetic peptide
GYTFTDYSIN

SEQ ID NO: 1717 - protein, 10 aa, Artificial Sequence
  Description of Artificial Sequence: Synthetic peptide
GYTFRHYSMN

SEQ ID NO: 1718 - protein, 10 aa, Artificial Sequence
  Description of Artificial Sequence: Synthetic peptide
GYTFTHYSMN

SEQ ID NO: 1719 - protein, 16 aa, Artificial Sequence
  Description of Artificial Sequence: Synthetic peptide
GIVYSGSTYYAASVKG

SEQ ID NO: 1720 - protein, 17 aa, Artificial Sequence
  Description of Artificial Sequence: Synthetic peptide
GISRSGENTYYADSVKG

SEQ ID NO: 1721 - protein, 17 aa, Artificial Sequence
  Description of Artificial Sequence: Synthetic peptide
GISWNSGSIGYADSVKG

SEQ ID NO: 1722 - protein, 16 aa, Artificial Sequence
  Description of Artificial Sequence: Synthetic peptide
GIVYSGSTYYAASVKG

SEQ ID NO: 1723 - protein, 17 aa, Artificial Sequence
  Description of Artificial Sequence: Synthetic peptide
WINPKNNNTNYAQKFQG

SEQ ID NO: 1724 - protein, 17 aa, Artificial Sequence
  Description of Artificial Sequence: Synthetic peptide
VISGSGGTTYYADSVKG

SEQ ID NO: 1725 - protein, 17 aa, Artificial Sequence
  Description of Artificial Sequence: Synthetic peptide
WISAYNGNTNYAQKFQG

SEQ ID NO: 1726 - protein, 16 aa, Artificial Sequence
  Description of Artificial Sequence: Synthetic peptide
GIVYSGSTYYAASVKG

SEQ ID NO: 1727 - protein, 16 aa, Artificial Sequence
  Description of Artificial Sequence: Synthetic peptide
GIVYSGSTYYAASVKG

SEQ ID NO: 1728 - protein, 16 aa, Artificial Sequence
  Description of Artificial Sequence: Synthetic peptide
GIVYSGSTYYAASVKG

SEQ ID NO: 1729 - protein, 17 aa, Artificial Sequence
  Description of Artificial Sequence: Synthetic peptide
YISSSGSTIYYADSVKG

SEQ ID NO: 1730 - protein, 17 aa, Artificial Sequence
  Description of Artificial Sequence: Synthetic peptide
YISSSGNTIYYADSVKG

SEQ ID NO: 1731 - protein, 16 aa, Artificial Sequence
  Description of Artificial Sequence: Synthetic peptide
GIVYSGSTYYAASVKG

SEQ ID NO: 1732 - protein, 16 aa, Artificial Sequence
  Description of Artificial Sequence: Synthetic peptide
GIVYSGSTYYAASVKG

SEQ ID NO: 1733 - protein, 16 aa, Artificial Sequence
  Description of Artificial Sequence: Synthetic peptide
GIVYSGSTYYAASVKG

SEQ ID NO: 1734 - protein, 16 aa, Artificial Sequence
  Description of Artificial Sequence: Synthetic peptide
SIYYSGSAYYNPSLKS

SEQ ID NO: 1735 - protein, 16 aa, Artificial Sequence
  Description of Artificial Sequence: Synthetic peptide
RIDWDEDKFYSTSLKT

SEQ ID NO: 1736 - protein, 17 aa, Artificial Sequence
  Description of Artificial Sequence: Synthetic peptide
SISSSSSYIYYADSVKG

SEQ ID NO: 1737 - protein, 17 aa, Artificial Sequence
  Description of Artificial Sequence: Synthetic peptide
YISSSGSTIYYADSVKG

SEQ ID NO: 1738 - protein, 17 aa, Artificial Sequence
  Description of Artificial Sequence: Synthetic peptide
MINPSGGVTAYSQTLQG

SEQ ID NO: 1739 - protein, 16 aa, Artificial Sequence
  Description of Artificial Sequence: Synthetic peptide
YIYYSGSTYYNPSLKS

SEQ ID NO: 1740 - protein, 17 aa, Artificial Sequence
  Description of Artificial Sequence: Synthetic peptide
GIIPIFGTANYAQKFQG

SEQ ID NO: 1741 - protein, 18 aa, Artificial Sequence
  Description of Artificial Sequence: Synthetic peptide
RTYYRSKWYSFYAISLKS

SEQ ID NO: 1742 - protein, 17 aa, Artificial Sequence
  Description of Artificial Sequence: Synthetic peptide
AISGSGGSTYYADSVKG

SEQ ID NO: 1743 - protein, 17 aa, Artificial Sequence
  Description of Artificial Sequence: Synthetic peptide
GISDSGVSTYYADSAKG

SEQ ID NO: 1744 - protein, 17 aa, Artificial Sequence
  Description of Artificial Sequence: Synthetic peptide
AISGSGGSTYYADSVKG

SEQ ID NO: 1745 - protein, 17 aa, Artificial Sequence
  Description of Artificial Sequence: Synthetic peptide
AISGSGGSTYYADSVKG

SEQ ID NO: 1746 - protein, 17 aa, Artificial Sequence
  Description of Artificial Sequence: Synthetic peptide
GISWNSGSIGYADSVKG

SEQ ID NO: 1747 - protein, 17 aa, Artificial Sequence
  Description of Artificial Sequence: Synthetic peptide
SINWKGNSLAYGDSVKG

SEQ ID NO: 1748 - protein, 17 aa, Artificial Sequence
  Description of Artificial Sequence: Synthetic peptide
AISGSGGSTYYADSVKG

SEQ ID NO: 1749 - protein, 17 aa, Artificial Sequence
  Description of Artificial Sequence: Synthetic peptide
AISGSGGSTYYADSVKG

SEQ ID NO: 1750 - protein, 17 aa, Artificial Sequence
  Description of Artificial Sequence: Synthetic peptide
AISGSGGSTYYADSVKG

SEQ ID NO: 1751 - protein, 17 aa, Artificial Sequence
  Description of Artificial Sequence: Synthetic peptide
AISGSGGSTYYADSVKG

SEQ ID NO: 1752 - protein, 17 aa, Artificial Sequence
  Description of Artificial Sequence: Synthetic peptide
AISGSGGSTYYADSVKG

SEQ ID NO: 1753 - protein, 17 aa, Artificial Sequence
  Description of Artificial Sequence: Synthetic peptide
AISGSGGSTYYADSVKG

SEQ ID NO: 1754 - protein, 17 aa, Artificial Sequence
  Description of Artificial Sequence: Synthetic peptide
AISGSGGSTYYADSVKG

SEQ ID NO: 1755 - protein, 17 aa, Artificial Sequence
  Description of Artificial Sequence: Synthetic peptide
WINTYTGESYFADDFKG

SEQ ID NO: 1756 - protein, 17 aa, Artificial Sequence
  Description of Artificial Sequence: Synthetic peptide
WINTETREPAYAYDFRG

SEQ ID NO: 1757 - protein, 17 aa, Artificial Sequence
  Description of Artificial Sequence: Synthetic peptide
RINTESGVPIYADDFKG

SEQ ID NO: 1758 - protein, 17 aa, Artificial Sequence
  Description of Artificial Sequence: Synthetic peptide
RINTETGEPLYADDFKG

SEQ ID NO: 1759 - protein, 7 aa, Artificial Sequence
  Description of Artificial Sequence: Synthetic peptide
HGGESDV

SEQ ID NO: 1760 - protein, 11 aa, Artificial Sequence
  Description of Artificial Sequence: Synthetic peptide
SPAHYYGGMDV

SEQ ID NO: 1761 - protein, 6 aa, Artificial Sequence
  Description of Artificial Sequence: Synthetic peptide
HSFLAY

SEQ ID NO: 1762 - protein, 7 aa, Artificial Sequence
  Description of Artificial Sequence: Synthetic peptide
HGGESDV

SEQ ID NO: 1763 - protein, 11 aa, Artificial Sequence
  Description of Artificial Sequence: Synthetic peptide
GPYYYQSYMDV

SEQ ID NO: 1764 - protein, 14 aa, Artificial Sequence
  Description of Artificial Sequence: Synthetic peptide
LDSSGYYYARGPRY

SEQ ID NO: 1765 - protein, 9 aa, Artificial Sequence
  Description of Artificial Sequence: Synthetic peptide
GPYYYYMDV

SEQ ID NO: 1766 - protein, 7 aa, Artificial Sequence
  Description of Artificial Sequence: Synthetic peptide
HGGESDV

SEQ ID NO: 1767 - protein, 7 aa, Artificial Sequence
  Description of Artificial Sequence: Synthetic peptide
HGGESDV

SEQ ID NO: 1768 - protein, 7 aa, Artificial Sequence
  Description of Artificial Sequence: Synthetic peptide
HGGESDV

SEQ ID NO: 1769 - protein, 8 aa, Artificial Sequence
  Description of Artificial Sequence: Synthetic peptide
ESGDGMDV

SEQ ID NO: 1770 - protein, 8 aa, Artificial Sequence
  Description of Artificial Sequence: Synthetic peptide
STMVREDY

SEQ ID NO: 1771 - protein, 7 aa, Artificial Sequence
  Description of Artificial Sequence: Synthetic peptide
HGGESDV

SEQ ID NO: 1772 - protein, 7 aa, Artificial Sequence
  Description of Artificial Sequence: Synthetic peptide
HGGESDV

SEQ ID NO: 1773 - protein, 7 aa, Artificial Sequence
  Description of Artificial Sequence: Synthetic peptide
HGGESDV

SEQ ID NO: 1774 - protein, 11 aa, Artificial Sequence
  Description of Artificial Sequence: Synthetic peptide
HWQEWPDAFDI

SEQ ID NO: 1775 - protein, 13 aa, Artificial Sequence
  Description of Artificial Sequence: Synthetic peptide
SGAGGTSATAFDI

SEQ ID NO: 1776 - protein, 10 aa, Artificial Sequence
  Description of Artificial Sequence: Synthetic peptide
TIAAVYAFDI

SEQ ID NO: 1777 - protein, 8 aa, Artificial Sequence
  Description of Artificial Sequence: Synthetic peptide
DLRGAFDI

SEQ ID NO: 1778 - protein, 11 aa, Artificial Sequence
  Description of Artificial Sequence: Synthetic peptide
EGSGSGWYFDF

SEQ ID NO: 1779 - protein, 13 aa, Artificial Sequence
  Description of Artificial Sequence: Synthetic peptide
AGIAARLRGAFDI

SEQ ID NO: 1780 - protein, 20 aa, Artificial Sequence
  Description of Artificial Sequence: Synthetic peptide
RGGYQLLRWDVGLLRSAFDI

SEQ ID NO: 1781 - protein, 13 aa, Artificial Sequence
  Description of Artificial Sequence: Synthetic peptide
SSPEGLFLYWFDP

SEQ ID NO: 1782 - protein, 9 aa, Artificial Sequence
  Description of Artificial Sequence: Synthetic peptide
VEGSGSLDY

SEQ ID NO: 1783 - protein, 9 aa, Artificial Sequence
  Description of Artificial Sequence: Synthetic peptide
RAGSEASDI

SEQ ID NO: 1784 - protein, 15 aa, Artificial Sequence
  Description of Artificial Sequence: Synthetic peptide
ATYKRELRYYYGMDV

SEQ ID NO: 1785 - protein, 15 aa, Artificial Sequence
  Description of Artificial Sequence: Synthetic peptide
ATYKRELRYYYGMDV

SEQ ID NO: 1786 - protein, 8 aa, Artificial Sequence
  Description of Artificial Sequence: Synthetic peptide
VGKAVPDV

SEQ ID NO: 1787 - protein, 13 aa, Artificial Sequence
  Description of Artificial Sequence: Synthetic peptide
HQGVAYYNYAMDV

SEQ ID NO: 1788 - protein, 8 aa, Artificial Sequence
  Description of Artificial Sequence: Synthetic peptide
VVRDGMDV

SEQ ID NO: 1789 - protein, 9 aa, Artificial Sequence
  Description of Artificial Sequence: Synthetic peptide
IPQTGTFDY

SEQ ID NO: 1790 - protein, 15 aa, Artificial Sequence
  Description of Artificial Sequence: Synthetic peptide
ANYKRELRYYYGMDV

SEQ ID NO: 1791 - protein, 11 aa, Artificial Sequence
  Description of Artificial Sequence: Synthetic peptide
ALVGATGAFDI

SEQ ID NO: 1792 - protein, 8 aa, Artificial Sequence
  Description of Artificial Sequence: Synthetic peptide
WFGEGFDP

SEQ ID NO: 1793 - protein, 17 aa, Artificial Sequence
  Description of Artificial Sequence: Synthetic peptide
VGYDSSGYYRDYYGMDV

SEQ ID NO: 1794 - protein, 13 aa, Artificial Sequence
  Description of Artificial Sequence: Synthetic peptide
MGWSSGYLGAFDI

SEQ ID NO: 1795 - protein, 13 aa, Artificial Sequence
  Description of Artificial Sequence: Synthetic peptide
GEIYYGYDGGFAY

SEQ ID NO: 1796 - protein, 8 aa, Artificial Sequence
  Description of Artificial Sequence: Synthetic peptide
DYSYAMDY

SEQ ID NO: 1797 - protein, 8 aa, Artificial Sequence
  Description of Artificial Sequence: Synthetic peptide
DYLYSLDF

SEQ ID NO: 1798 - protein, 8 aa, Artificial Sequence
  Description of Artificial Sequence: Synthetic peptide
DYLYSCDY

SEQ ID NO: 1799 - protein, 11 aa, Artificial Sequence
  Description of Artificial Sequence: Synthetic peptide
RASQSISSYLN

SEQ ID NO: 1800 - protein, 12 aa, Artificial Sequence
  Description of Artificial Sequence: Synthetic peptide
RASQSISSSFLA

SEQ ID NO: 1801 - protein, 16 aa, Artificial Sequence
  Description of Artificial Sequence: Synthetic peptide
RSSQSLLHSNGYNYLD

SEQ ID NO: 1802 - protein, 16 aa, Artificial Sequence
  Description of Artificial Sequence: Synthetic peptide
KSSQSLLRNDGKTPLY

SEQ ID NO: 1803 - protein, 16 aa, Artificial Sequence
  Description of Artificial Sequence: Synthetic peptide
RSSQSLLHSNGYNYLN

SEQ ID NO: 1804 - protein, 11 aa, Artificial Sequence
  Description of Artificial Sequence: Synthetic peptide
RASQSISSYLN

SEQ ID NO: 1805 - protein, 16 aa, Artificial Sequence
  Description of Artificial Sequence: Synthetic peptide
RSSQSLLYSNGYNYVD

SEQ ID NO: 1806 - protein, 11 aa, Artificial Sequence
  Description of Artificial Sequence: Synthetic peptide
RASQSVSSNLA

SEQ ID NO: 1807 - protein, 11 aa, Artificial Sequence
  Description of Artificial Sequence: Synthetic peptide
RASQSVSSKLA

SEQ ID NO: 1808 - protein, 12 aa, Artificial Sequence
  Description of Artificial Sequence: Synthetic peptide
RASQSVGSTNLA

SEQ ID NO: 1809 - protein, 11 aa, Artificial Sequence
  Description of Artificial Sequence: Synthetic peptide
RASQSISSYLN

SEQ ID NO: 1810 - protein, 16 aa, Artificial Sequence
  Description of Artificial Sequence: Synthetic peptide
KSSESLVHNSGKTYLN

SEQ ID NO: 1811 - protein, 11 aa, Artificial Sequence
  Description of Artificial Sequence: Synthetic peptide
QASEDINKFLN

SEQ ID NO: 1812 - protein, 11 aa, Artificial Sequence
  Description of Artificial Sequence: Synthetic peptide
RASQSVGSNLA

SEQ ID NO: 1813 - protein, 12 aa, Artificial Sequence
  Description of Artificial Sequence: Synthetic peptide
RASQSIGSSSLA

SEQ ID NO: 1814 - protein, 11 aa, Artificial Sequence
  Description of Artificial Sequence: Synthetic peptide
KASQDIDDAMN

SEQ ID NO: 1815 - protein, 11 aa, Artificial Sequence
  Description of Artificial Sequence: Synthetic peptide
RASQDIYNNLA

SEQ ID NO: 1816 - protein, 16 aa, Artificial Sequence
  Description of Artificial Sequence: Synthetic peptide
RSSQSLLHSNGYNYLD

SEQ ID NO: 1817 - protein, 11 aa, Artificial Sequence
  Description of Artificial Sequence: Synthetic peptide
GGNNIGTKSVH

SEQ ID NO: 1818 - protein, 11 aa, Artificial Sequence
  Description of Artificial Sequence: Synthetic peptide
SGDGLSKKYVS

SEQ ID NO: 1819 - protein, 11 aa, Artificial Sequence
  Description of Artificial Sequence: Synthetic peptide
RASQGIRNWLA

SEQ ID NO: 1820 - protein, 11 aa, Artificial Sequence
  Description of Artificial Sequence: Synthetic peptide
GGNNIGSKSVH

SEQ ID NO: 1821 - protein, 11 aa, Artificial Sequence
  Description of Artificial Sequence: Synthetic peptide
QGDSLGNYYAT

SEQ ID NO: 1822 - protein, 12 aa, Artificial Sequence
  Description of Artificial Sequence: Synthetic peptide
RASQSVSSAYLA

SEQ ID NO: 1823 - protein, 11 aa, Artificial Sequence
  Description of Artificial Sequence: Synthetic peptide
RASQSVSNSLA

SEQ ID NO: 1824 - protein, 12 aa, Artificial Sequence
  Description of Artificial Sequence: Synthetic peptide
RASQSVSSSFLA

SEQ ID NO: 1825 - protein, 12 aa, Artificial Sequence
  Description of Artificial Sequence: Synthetic peptide
RASQSVSTTFLA

SEQ ID NO: 1826 - protein, 11 aa, Artificial Sequence
  Description of Artificial Sequence: Synthetic peptide
RASQSISSYLN

SEQ ID NO: 1827 - protein, 12 aa, Artificial Sequence
  Description of Artificial Sequence: Synthetic peptide
RATQSIGSSFLA

SEQ ID NO: 1828 - protein, 12 aa, Artificial Sequence
  Description of Artificial Sequence: Synthetic peptide
RASQSVSSSYLA

SEQ ID NO: 1829 - protein, 12 aa, Artificial Sequence
  Description of Artificial Sequence: Synthetic peptide
RASQSVSSSYLA

SEQ ID NO: 1830 - protein, 12 aa, Artificial Sequence
  Description of Artificial Sequence: Synthetic peptide
RASQRVASNYLA

SEQ ID NO: 1831 - protein, 12 aa, Artificial Sequence
  Description of Artificial Sequence: Synthetic peptide
RASQSLSSNFLA

SEQ ID NO: 1832 - protein, 16 aa, Artificial Sequence
  Description of Artificial Sequence: Synthetic peptide
RSSQSLLHSNGYNYLD

SEQ ID NO: 1833 - protein, 12 aa, Artificial Sequence
  Description of Artificial Sequence: Synthetic peptide
RASQSVSSSYLA

SEQ ID NO: 1834 - protein, 12 aa, Artificial Sequence
  Description of Artificial Sequence: Synthetic peptide
RASQSVASSFLA

SEQ ID NO: 1835 - protein, 11 aa, Artificial Sequence
  Description of Artificial Sequence: Synthetic peptide
RASQDVNTAVS

SEQ ID NO: 1836 - protein, 15 aa, Artificial Sequence
  Description of Artificial Sequence: Synthetic peptide
RASESVSVIGAHLIH

SEQ ID NO: 1837 - protein, 15 aa, Artificial Sequence
  Description of Artificial Sequence: Synthetic peptide
RASESVTILGSHLIY

SEQ ID NO: 1838 - protein, 15 aa, Artificial Sequence
  Description of Artificial Sequence: Synthetic peptide
RASESVTILGSHLIY

SEQ ID NO: 1839 - protein, 7 aa, Artificial Sequence
  Description of Artificial Sequence: Synthetic peptide
AASSLQS

SEQ ID NO: 1840 - protein, 7 aa, Artificial Sequence
  Description of Artificial Sequence: Synthetic peptide
GASRRAT

SEQ ID NO: 1841 - protein, 7 aa, Artificial Sequence
  Description of Artificial Sequence: Synthetic peptide
LGSNRAS

SEQ ID NO: 1842 - protein, 7 aa, Artificial Sequence
  Description of Artificial Sequence: Synthetic peptide
EVSNRFS

SEQ ID NO: 1843 - protein, 7 aa, Artificial Sequence
  Description of Artificial Sequence: Synthetic peptide
LGSKRAS

SEQ ID NO: 1844 - protein, 7 aa, Artificial Sequence
  Description of Artificial Sequence: Synthetic peptide
GASTLAS

SEQ ID NO: 1845 - protein, 7 aa, Artificial Sequence
  Description of Artificial Sequence: Synthetic peptide
LGSNRAS

SEQ ID NO: 1846 - protein, 7 aa, Artificial Sequence
  Description of Artificial Sequence: Synthetic peptide
GASTRAS

SEQ ID NO: 1847 - protein, 7 aa, Artificial Sequence
  Description of Artificial Sequence: Synthetic peptide
GASIRAT

SEQ ID NO: 1848 - protein, 7 aa, Artificial Sequence
  Description of Artificial Sequence: Synthetic peptide
DASNRAT

SEQ ID NO: 1849 - protein, 7 aa, Artificial Sequence
  Description of Artificial Sequence: Synthetic peptide
AASSLQS

SEQ ID NO: 1850 - protein, 7 aa, Artificial Sequence
  Description of Artificial Sequence: Synthetic peptide
EVSNRDS

SEQ ID NO: 1851 - protein, 7 aa, Artificial Sequence
  Description of Artificial Sequence: Synthetic peptide
DASTLQT

SEQ ID NO: 1852 - protein, 7 aa, Artificial Sequence
  Description of Artificial Sequence: Synthetic peptide
GASTRAT

SEQ ID NO: 1853 - protein, 7 aa, Artificial Sequence
  Description of Artificial Sequence: Synthetic peptide
GASSRAS

SEQ ID NO: 1854 - protein, 7 aa, Artificial Sequence
  Description of Artificial Sequence: Synthetic peptide
SATSPVP

SEQ ID NO: 1855 - protein, 7 aa, Artificial Sequence
  Description of Artificial Sequence: Synthetic peptide
AANKSQS

SEQ ID NO: 1856 - protein, 7 aa, Artificial Sequence
  Description of Artificial Sequence: Synthetic peptide
LGSNRAS

SEQ ID NO: 1857 - protein, 7 aa, Artificial Sequence
  Description of Artificial Sequence: Synthetic peptide
DDSVRPS

SEQ ID NO: 1858 - protein, 7 aa, Artificial Sequence
  Description of Artificial Sequence: Synthetic peptide
RDKERPS

SEQ ID NO: 1859 - protein, 7 aa, Artificial Sequence
  Description of Artificial Sequence: Synthetic peptide
AASNLQS

SEQ ID NO: 1860 - protein, 7 aa, Artificial Sequence
  Description of Artificial Sequence: Synthetic peptide
GKNNRPS

SEQ ID NO: 1861 - protein, 7 aa, Artificial Sequence
  Description of Artificial Sequence: Synthetic peptide
GTNNRPS

SEQ ID NO: 1862 - protein, 7 aa, Artificial Sequence
  Description of Artificial Sequence: Synthetic peptide
GASTRAT

SEQ ID NO: 1863 - protein, 7 aa, Artificial Sequence
  Description of Artificial Sequence: Synthetic peptide
DASSRAT

SEQ ID NO: 1864 - protein, 7 aa, Artificial Sequence
  Description of Artificial Sequence: Synthetic peptide
GASSRAT

SEQ ID NO: 1865 - protein, 7 aa, Artificial Sequence
  Description of Artificial Sequence: Synthetic peptide
GSSNRAT

SEQ ID NO: 1866 - protein, 7 aa, Artificial Sequence
  Description of Artificial Sequence: Synthetic peptide
AASSLQS

SEQ ID NO: 1867 - protein, 7 aa, Artificial Sequence
  Description of Artificial Sequence: Synthetic peptide
GASQRAT

SEQ ID NO: 1868 - protein, 7 aa, Artificial Sequence
  Description of Artificial Sequence: Synthetic peptide
GASSRAT

SEQ ID NO: 1869 - protein, 7 aa, Artificial Sequence
  Description of Artificial Sequence: Synthetic peptide
GASSRAT

SEQ ID NO: 1870 - protein, 7 aa, Artificial Sequence
  Description of Artificial Sequence: Synthetic peptide
GASSRAT

SEQ ID NO: 1871 - protein, 7 aa, Artificial Sequence
  Description of Artificial Sequence: Synthetic peptide
GASNWAT

SEQ ID NO: 1872 - protein, 7 aa, Artificial Sequence
  Description of Artificial Sequence: Synthetic peptide
LGSNRAS

SEQ ID NO: 1873 - protein, 7 aa, Artificial Sequence
  Description of Artificial Sequence: Synthetic peptide
GTSSRAT

SEQ ID NO: 1874 - protein, 7 aa, Artificial Sequence
  Description of Artificial Sequence: Synthetic peptide
GASGRAT

SEQ ID NO: 1875 - protein, 7 aa, Artificial Sequence
  Description of Artificial Sequence: Synthetic peptide
SASYRYT

SEQ ID NO: 1876 - protein, 7 aa, Artificial Sequence
  Description of Artificial Sequence: Synthetic peptide
LASNLET

SEQ ID NO: 1877 - protein, 7 aa, Artificial Sequence
  Description of Artificial Sequence: Synthetic peptide
LASNVQT

SEQ ID NO: 1878 - protein, 7 aa, Artificial Sequence
  Description of Artificial Sequence: Synthetic peptide
LASNVQT

SEQ ID NO: 1879 - protein, 9 aa, Artificial Sequence
  Description of Artificial Sequence: Synthetic peptide
QQSYSTPYT

SEQ ID NO: 1880 - protein, 10 aa, Artificial Sequence
  Description of Artificial Sequence: Synthetic peptide
QQYHSSPSWT

SEQ ID NO: 1881 - protein, 9 aa, Artificial Sequence
  Description of Artificial Sequence: Synthetic peptide
MQALQTPYT

SEQ ID NO: 1882 - protein, 8 aa, Artificial Sequence
  Description of Artificial Sequence: Synthetic peptide
MQNIQFPS

SEQ ID NO: 1883 - protein, 9 aa, Artificial Sequence
  Description of Artificial Sequence: Synthetic peptide
MQALQTPYT

SEQ ID NO: 1884 - protein, 8 aa, Artificial Sequence
  Description of Artificial Sequence: Synthetic peptide
QQSYKRAS

SEQ ID NO: 1885 - protein, 9 aa, Artificial Sequence
  Description of Artificial Sequence: Synthetic peptide
MQGRQFPYS

SEQ ID NO: 1886 - protein, 8 aa, Artificial Sequence
  Description of Artificial Sequence: Synthetic peptide
QQYGSSLT

SEQ ID NO: 1887 - protein, 9 aa, Artificial Sequence
  Description of Artificial Sequence: Synthetic peptide
QQYGSSSWT

SEQ ID NO: 1888 - protein, 10 aa, Artificial Sequence
  Description of Artificial Sequence: Synthetic peptide
QQYGSSPPWT

SEQ ID NO: 1889 - protein, 7 aa, Artificial Sequence
  Description of Artificial Sequence: Synthetic peptide
QQSYTLA

SEQ ID NO: 1890 - protein, 9 aa, Artificial Sequence
  Description of Artificial Sequence: Synthetic peptide
MQGTHWPGT

SEQ ID NO: 1891 - protein, 9 aa, Artificial Sequence
  Description of Artificial Sequence: Synthetic peptide
QQYESLPLT

SEQ ID NO: 1892 - protein, 10 aa, Artificial Sequence
  Description of Artificial Sequence: Synthetic peptide
QQYNDWLPVT

SEQ ID NO: 1893 - protein, 10 aa, Artificial Sequence
  Description of Artificial Sequence: Synthetic peptide
QQYAGSPPFT

SEQ ID NO: 1894 - protein, 9 aa, Artificial Sequence
  Description of Artificial Sequence: Synthetic peptide
LQHDNFPLT

SEQ ID NO: 1895 - protein, 9 aa, Artificial Sequence
  Description of Artificial Sequence: Synthetic peptide
QHYYRFPYS

SEQ ID NO: 1896 - protein, 9 aa, Artificial Sequence
  Description of Artificial Sequence: Synthetic peptide
MQALQTPYT

SEQ ID NO: 1897 - protein, 11 aa, Artificial Sequence
  Description of Artificial Sequence: Synthetic peptide
QVWDSDSEHVV

SEQ ID NO: 1898 - protein, 9 aa, Artificial Sequence
  Description of Artificial Sequence: Synthetic peptide
QAWDDTTVV

SEQ ID NO: 1899 - protein, 9 aa, Artificial Sequence
  Description of Artificial Sequence: Synthetic peptide
QKYNSAPFT

SEQ ID NO: 1900 - protein, 12 aa, Artificial Sequence
  Description of Artificial Sequence: Synthetic peptide
SSRDSSGDHLRV

SEQ ID NO: 1901 - protein, 11 aa, Artificial Sequence
  Description of Artificial Sequence: Synthetic peptide
NSRDSSGHHLL

SEQ ID NO: 1902 - protein, 14 aa, Artificial Sequence
  Description of Artificial Sequence: Synthetic peptide
QHYGSSFNGSSLFT

SEQ ID NO: 1903 - protein, 10 aa, Artificial Sequence
  Description of Artificial Sequence: Synthetic peptide
QQFGTSSGLT

SEQ ID NO: 1904 - protein, 10 aa, Artificial Sequence
  Description of Artificial Sequence: Synthetic peptide
QQYHSSPSWT

SEQ ID NO: 1905 - protein, 10 aa, Artificial Sequence
  Description of Artificial Sequence: Synthetic peptide
QQYHSSPSWT

SEQ ID NO: 1906 - protein, 9 aa, Artificial Sequence
  Description of Artificial Sequence: Synthetic peptide
QQSYSTPYS

SEQ ID NO: 1907 - protein, 10 aa, Artificial Sequence
  Description of Artificial Sequence: Synthetic peptide
QHYESSPSWT

SEQ ID NO: 1908 - protein, 10 aa, Artificial Sequence
  Description of Artificial Sequence: Synthetic peptide
QQYGSPPRFT

SEQ ID NO: 1909 - protein, 10 aa, Artificial Sequence
  Description of Artificial Sequence: Synthetic peptide
QHYGSSPSWT

SEQ ID NO: 1910 - protein, 10 aa, Artificial Sequence
  Description of Artificial Sequence: Synthetic peptide
QHYDSSPSWT

SEQ ID NO: 1911 - protein, 10 aa, Artificial Sequence
  Description of Artificial Sequence: Synthetic peptide
QYYGTSPMYT

SEQ ID NO: 1912 - protein, 9 aa, Artificial Sequence
  Description of Artificial Sequence: Synthetic peptide
MQALQTPLT

SEQ ID NO: 1913 - protein, 11 aa, Artificial Sequence
  Description of Artificial Sequence: Synthetic peptide
QHYGNSPPKFT

SEQ ID NO: 1914 - protein, 10 aa, Artificial Sequence
  Description of Artificial Sequence: Synthetic peptide
QHYGGSPRLT

SEQ ID NO: 1915 - protein, 9 aa, Artificial Sequence
  Description of Artificial Sequence: Synthetic peptide
QQHYSTPWT

SEQ ID NO: 1916 - protein, 9 aa, Artificial Sequence
  Description of Artificial Sequence: Synthetic peptide
LQSRIFPRT

SEQ ID NO: 1917 - protein, 9 aa, Artificial Sequence
  Description of Artificial Sequence: Synthetic peptide
LQSRTIPRT

SEQ ID NO: 1918 - protein, 9 aa, Artificial Sequence
  Description of Artificial Sequence: Synthetic peptide
LQSRTIPRT

SEQ ID NO: 1919 - protein, 21 aa, Artificial Sequence
  Description of Artificial Sequence: Synthetic peptide
MALPVTALLLPLALLLHAARP

SEQ ID NO: 1920 - DNA, 63 bp, Artificial Sequence; identical to SEQ ID NO: 3
  Description of Artificial Sequence: Synthetic oligonucleotide

SEQ ID NO: 1921 - protein, 45 aa, Artificial Sequence; identical to SEQ ID NO: 4
  Description of Artificial Sequence: Synthetic polypeptide

SEQ ID NO: 1922 - DNA, 135 bp, Artificial Sequence; identical to SEQ ID NO: 5
  Description of Artificial Sequence: Synthetic polynucleotide

SEQ ID NO: 1923 - protein, 24 aa, Artificial Sequence
  Description of Artificial Sequence: Synthetic peptide
IYIWAPLAGTCGVLLLSLVITLYC

SEQ ID NO: 1924 - DNA, 72 bp, Artificial Sequence; identical to SEQ ID NO: 13
  Description of Artificial Sequence: Synthetic oligonucleotide

SEQ ID NO: 1925 - protein, 42 aa, Artificial Sequence; identical to SEQ ID NO: 14
  Description of Artificial Sequence: Synthetic polypeptide

SEQ ID NO: 1926 - DNA, 126 bp, Artificial Sequence; identical to SEQ ID NO: 15
  Description of Artificial Sequence: Synthetic polynucleotide

SEQ ID NO: 1927 - protein, 41 aa, Artificial Sequence
  Description of Artificial Sequence: Synthetic polypeptide
RSKRSRLLHSDYMNMTPRRPGPTRKHYQPYAPPRDFAAYRS

SEQ ID NO: 1928 - DNA, 123 bp, Artificial Sequence; identical to SEQ ID NO: 17
  Description of Artificial Sequence: Synthetic polynucleotide

SEQ ID NO: 1929 - protein, 35 aa, Artificial Sequence
  Description of Artificial Sequence: Synthetic polypeptide
TKKKYSSSVHDPNGEYMFMRAVNTAKKSRLTDVTL

SEQ ID NO: 1930 - DNA, 105 bp, Artificial Sequence
  Description of Artificial Sequence: Synthetic polynucleotide
acaaaaaagaagtattcatccagtgtgcacgaccctaacggtgaatacatgttcatgagagcagtgaacacagccaaaaaatccagactcacagatgtgacccta

SEQ ID NO: 1931 - protein, 112 aa, Artificial Sequence; identical to SEQ ID NO: 18
  Description of Artificial Sequence: Synthetic polypeptide

SEQ ID NO: 1932 - DNA, 336 bp, Artificial Sequence; identical to SEQ ID NO: 19
  Description of Artificial Sequence: Synthetic polynucleotide

SEQ ID NO: 1933 - protein, 112 aa, Homo sapiens; identical to SEQ ID NO: 20

SEQ ID NO: 1934 - DNA, 336 bp, Homo sapiens; identical to SEQ ID NO: 21

SEQ ID NO: 1935 - protein, 230 aa, Artificial Sequence; identical to SEQ ID NO: 6
  Description of Artificial Sequence: Synthetic polypeptide

SEQ ID NO: 1936 - DNA, 690 bp, Artificial Sequence; identical to SEQ ID NO: 7
  Description of Artificial Sequence: Synthetic polynucleotide

SEQ ID NO: 1937 - protein, 4 aa, Artificial Sequence
  Description of Artificial Sequence: Synthetic peptide
RGDS

SEQ ID NO: 1938 - DNA, 63 bp, Artificial Sequence
  Description of Artificial Sequence: Synthetic oligonucleotide
atggccctccctgtcaccgccctgctgcttccgctggctcttctgctccacgccgctcggccc

SEQ ID NO: 1939 - DNA, 72 bp, Artificial Sequence
  Description of Artificial Sequence: Synthetic oligonucleotide
atctacatttgggcccctctggctggtacttgcggggtcctgctgctttcactcgtgatcactctttactgt

SEQ ID NO: 1940 - DNA, 126 bp, Artificial Sequence
  Description of Artificial Sequence: Synthetic polynucleotide
aagcgcggtcggaagaagctgctgtacatctttaagcaacccttcatgaggcctgtgcagactactcaagaggaggacggctgttcatgccggttcccagaggaggaggaaggcggctgcgaactg

SEQ ID NO: 1941 - DNA, 336 bp, Artificial Sequence
  Description of Artificial Sequence: Synthetic polynucleotide
cgcgtgaaattcagccgcagcgcagatgctccagcctacaagcaggggcagaaccagctctacaacgaactcaatcttggtcggagagaggagtacgacgtgctggacaagcggagaggacgggacccagaaatgggcgggaagccgcgcagaaagaatccccaagagggcctgtacaacgagctccaaaaggataagatggcagaagcctatagcgagattggtatgaaaggggaacgcagaagaggcaaaggccacgacggactgtaccagggactcagcaccgccaccaaggacacctatgacgctcttcacatgcaggccctgccgcctcgg
